United States Patent Application Publication US 2025/0313840 A1 - sequence listing, part 7

SEQ ID NO: 178234 - DNA, 17 bp, synthetic construct
  source 1..17: mol_type = other DNA
cctggggcctcagctgc

SEQ ID NO: 178235 - DNA, 17 bp, synthetic construct
  source 1..17: mol_type = other DNA
ccctggggcctcagctg

SEQ ID NO: 178236 - DNA, 17 bp, synthetic construct
  source 1..17: mol_type = other DNA
cccctggggcctcagct

SEQ ID NO: 178237 - DNA, 17 bp, synthetic construct
  source 1..17: mol_type = other DNA
gcccctggggcctcagc

SEQ ID NO: 178238 - DNA, 17 bp, synthetic construct
  source 1..17: mol_type = other DNA
agcccctggggcctcag

SEQ ID NO: 178239 - DNA, 17 bp, synthetic construct
  source 1..17: mol_type = other DNA
aagcccctggggcctca

SEQ ID NO: 178240 - DNA, 17 bp, synthetic construct
  source 1..17: mol_type = other DNA
gaagcccctggggcctc

SEQ ID NO: 178241 - DNA, 17 bp, synthetic construct
  source 1..17: mol_type = other DNA
tgaagcccctggggcct

SEQ ID NO: 178242 - DNA, 17 bp, synthetic construct
  source 1..17: mol_type = other DNA
ctgaagcccctggggcc

SEQ ID NO: 178243 - DNA, 17 bp, synthetic construct
  source 1..17: mol_type = other DNA
actgaagcccctggggc

SEQ ID NO: 178244 - DNA, 17 bp, synthetic construct
  source 1..17: mol_type = other DNA
cactgaagcccctgggg

SEQ ID NO: 178245 - DNA, 17 bp, synthetic construct
  source 1..17: mol_type = other DNA
ccactgaagcccctggg

SEQ ID NO: 178246 - DNA, 17 bp, synthetic construct
  source 1..17: mol_type = other DNA
gccactgaagcccctgg

SEQ ID NO: 178247 - DNA, 17 bp, synthetic construct
  source 1..17: mol_type = other DNA
agccactgaagcccctg

SEQ ID NO: 178248 - DNA, 17 bp, synthetic construct
  source 1..17: mol_type = other DNA
gagccactgaagcccct

SEQ ID NO: 178249 - DNA, 17 bp, synthetic construct
  source 1..17: mol_type = other DNA
ggagccactgaagcccc

SEQ ID NO: 178250 - DNA, 17 bp, synthetic construct
  source 1..17: mol_type = other DNA
gggagccactgaagccc

SEQ ID NO: 178251 - DNA, 17 bp, synthetic construct
  source 1..17: mol_type = other DNA
ggggagccactgaagcc

SEQ ID NO: 178252 - DNA, 17 bp, synthetic construct
  source 1..17: mol_type = other DNA
tggggagccactgaagc

SEQ ID NO: 178253 - DNA, 17 bp, synthetic construct
  source 1..17: mol_type = other DNA
ttggggagccactgaag

SEQ ID NO: 178254 - DNA, 17 bp, synthetic construct
  source 1..17: mol_type = other DNA
cttggggagccactgaa

SEQ ID NO: 178255 - DNA, 17 bp, synthetic construct
  source 1..17: mol_type = other DNA
ccttggggagccactga

SEQ ID NO: 178256 - DNA, 17 bp, synthetic construct
  source 1..17: mol_type = other DNA
gccttggggagccactg

SEQ ID NO: 178257 - DNA, 17 bp, synthetic construct
  source 1..17: mol_type = other DNA
cgccttggggagccact

SEQ ID NO: 178258 - DNA, 17 bp, synthetic construct
  source 1..17: mol_type = other DNA
ccgccttggggagccac

SEQ ID NO: 178259 - DNA, 17 bp, synthetic construct
  source 1..17: mol_type = other DNA
gccgccttggggagcca

SEQ ID NO: 178260 - DNA, 17 bp, synthetic construct
  source 1..17: mol_type = other DNA
tgccgccttggggagcc

SEQ ID NO: 178261 - DNA, 17 bp, synthetic construct
  source 1..17: mol_type = other DNA
ctgccgccttggggagc

SEQ ID NO: 178262 - DNA, 17 bp, synthetic construct
  source 1..17: mol_type = other DNA
actgccgccttggggag

SEQ ID NO: 178263 - DNA, 17 bp, synthetic construct
  source 1..17: mol_type = other DNA
gactgccgccttgggga

SEQ ID NO: 178264 - DNA, 17 bp, synthetic construct
  source 1..17: mol_type = other DNA
tgactgccgccttgggg

SEQ ID NO: 178265 - DNA, 17 bp, synthetic construct
  source 1..17: mol_type = other DNA
gtgactgccgccttggg

SEQ ID NO: 178266 - DNA, 17 bp, synthetic construct
  source 1..17: mol_type = other DNA
tgtgactgccgccttgg

SEQ ID NO: 178267 - DNA, 17 bp, synthetic construct
  source 1..17: mol_type = other DNA
ctgtgactgccgccttg

SEQ ID NO: 178268 - DNA, 17 bp, synthetic construct
  source 1..17: mol_type = other DNA
actgtgactgccgcctt

SEQ ID NO: 178269 - DNA, 17 bp, synthetic construct
  source 1..17: mol_type = other DNA
cactgtgactgccgcct

SEQ ID NO: 178270 - DNA, 17 bp, synthetic construct
  source 1..17: mol_type = other DNA
ccactgtgactgccgcc

SEQ ID NO: 178271 - DNA, 17 bp, synthetic construct
  source 1..17: mol_type = other DNA
accactgtgactgccgc

SEQ ID NO: 178272 - DNA, 17 bp, synthetic construct
  source 1..17: mol_type = other DNA
caccactgtgactgccg

SEQ ID NO: 178273 - DNA, 17 bp, synthetic construct
  source 1..17: mol_type = other DNA
tcaccactgtgactgcc

SEQ ID NO: 178274 - DNA, 17 bp, synthetic construct
  source 1..17: mol_type = other DNA
gtcaccactgtgactgc

SEQ ID NO: 178275 - DNA, 17 bp, synthetic construct
  source 1..17: mol_type = other DNA
cgtcaccactgtgactg

SEQ ID NO: 178276 - DNA, 17 bp, synthetic construct
  source 1..17: mol_type = other DNA
gcgtcaccactgtgact

SEQ ID NO: 178277 - DNA, 17 bp, synthetic construct
  source 1..17: mol_type = other DNA
agcgtcaccactgtgac

SEQ ID NO: 178278 - DNA, 17 bp, synthetic construct
  source 1..17: mol_type = other DNA
cagcgtcaccactgtga

SEQ ID NO: 178279 - DNA, 17 bp, synthetic construct
  source 1..17: mol_type = other DNA
ccagcgtcaccactgtg

SEQ ID NO: 178280 - DNA, 17 bp, synthetic construct
  source 1..17: mol_type = other DNA
gccagcgtcaccactgt

SEQ ID NO: 178281 - DNA, 17 bp, synthetic construct
  source 1..17: mol_type = other DNA
agccagcgtcaccactg

SEQ ID NO: 178282 - DNA, 17 bp, synthetic construct
  source 1..17: mol_type = other DNA
cagccagcgtcaccact

SEQ ID NO: 178283 - DNA, 17 bp, synthetic construct
  source 1..17: mol_type = other DNA
gcagccagcgtcaccac

SEQ ID NO: 178284 - DNA, 17 bp, synthetic construct
  source 1..17: mol_type = other DNA
ggcagccagcgtcacca

SEQ ID NO: 178285 - DNA, 17 bp, synthetic construct
  source 1..17: mol_type = other DNA
tggcagccagcgtcacc

SEQ ID NO: 178286 - DNA, 17 bp, synthetic construct
  source 1..17: mol_type = other DNA
atggcagccagcgtcac

SEQ ID NO: 178287 - DNA, 17 bp, synthetic construct
  source 1..17: mol_type = other DNA
catggcagccagcgtca

SEQ ID NO: 178288 - DNA, 17 bp, synthetic construct
  source 1..17: mol_type = other DNA
tcatggcagccagcgtc

SEQ ID NO: 178289 - DNA, 17 bp, synthetic construct
  source 1..17: mol_type = other DNA
gtcatggcagccagcgt

SEQ ID NO: 178290 - DNA, 17 bp, synthetic construct
  source 1..17: mol_type = other DNA
cgtcatggcagccagcg

SEQ ID NO: 178291 - DNA, 17 bp, synthetic construct
  source 1..17: mol_type = other DNA
gcgtcatggcagccagc

SEQ ID NO: 178292 - DNA, 17 bp, synthetic construct
  source 1..17: mol_type = other DNA
ggcgtcatggcagccag

SEQ ID NO: 178293 - DNA, 17 bp, synthetic construct
  source 1..17: mol_type = other DNA
aggcgtcatggcagcca

SEQ ID NO: 178294 - DNA, 17 bp, synthetic construct
  source 1..17: mol_type = other DNA
caggcgtcatggcagcc

SEQ ID NO: 178295 - DNA, 17 bp, synthetic construct
  source 1..17: mol_type = other DNA
ccaggcgtcatggcagc

SEQ ID NO: 178296 - DNA, 17 bp, synthetic construct
  source 1..17: mol_type = other DNA
cccaggcgtcatggcag

SEQ ID NO: 178297 - DNA, 17 bp, synthetic construct
  source 1..17: mol_type = other DNA
ccccaggcgtcatggca

SEQ ID NO: 178298 - DNA, 17 bp, synthetic construct
  source 1..17: mol_type = other DNA
tccccaggcgtcatggc

SEQ ID NO: 178299 - DNA, 17 bp, synthetic construct
  source 1..17: mol_type = other DNA
ctccccaggcgtcatgg

SEQ ID NO: 178300 - DNA, 17 bp, synthetic construct
  source 1..17: mol_type = other DNA
gctccccaggcgtcatg

SEQ ID NO: 178301 - DNA, 17 bp, synthetic construct
  source 1..17: mol_type = other DNA
cgctccccaggcgtcat

SEQ ID NO: 178302 - DNA, 17 bp, synthetic construct
  source 1..17: mol_type = other DNA
tcgctccccaggcgtca

SEQ ID NO: 178303 - DNA, 17 bp, synthetic construct
  source 1..17: mol_type = other DNA
ctcgctccccaggcgtc

SEQ ID NO: 178304 - DNA, 17 bp, synthetic construct
  source 1..17: mol_type = other DNA
cctcgctccccaggcgt

SEQ ID NO: 178305 - DNA, 17 bp, synthetic construct
  source 1..17: mol_type = other DNA
ccctcgctccccaggcg

SEQ ID NO: 178306 - DNA, 17 bp, synthetic construct
  source 1..17: mol_type = other DNA
gccctcgctccccaggc

SEQ ID NO: 178307 - DNA, 17 bp, synthetic construct
  source 1..17: mol_type = other DNA
tgccctcgctccccagg

SEQ ID NO: 178308 - DNA, 17 bp, synthetic construct
  source 1..17: mol_type = other DNA
gtgccctcgctccccag

SEQ ID NO: 178309 - DNA, 17 bp, synthetic construct
  source 1..17: mol_type = other DNA
ggtgccctcgctcccca

SEQ ID NO: 178310 - DNA, 17 bp, synthetic construct
  source 1..17: mol_type = other DNA
tggtgccctcgctcccc

SEQ ID NO: 178311 - DNA, 17 bp, synthetic construct
  source 1..17: mol_type = other DNA
gtggtgccctcgctccc

SEQ ID NO: 178312 - DNA, 17 bp, synthetic construct
  source 1..17: mol_type = other DNA
ggtggtgccctcgctcc

SEQ ID NO: 178313 - DNA, 17 bp, synthetic construct
  source 1..17: mol_type = other DNA
tggtggtgccctcgctc

SEQ ID NO: 178314 - DNA, 17 bp, synthetic construct
  source 1..17: mol_type = other DNA
gtggtggtgccctcgct

SEQ ID NO: 178315 - DNA, 17 bp, synthetic construct
  source 1..17: mol_type = other DNA
cgtggtggtgccctcgc

SEQ ID NO: 178316 - DNA, 17 bp, synthetic construct
  source 1..17: mol_type = other DNA
ccgtggtggtgccctcg

SEQ ID NO: 178317 - DNA, 17 bp, synthetic construct
  source 1..17: mol_type = other DNA
tccgtggtggtgccctc

SEQ ID NO: 178318 - DNA, 17 bp, synthetic construct
  source 1..17: mol_type = other DNA
ctccgtggtggtgccct

SEQ ID NO: 178319 - DNA, 17 bp, synthetic construct
  source 1..17: mol_type = other DNA
gctccgtggtggtgccc

SEQ ID NO: 178320 - DNA, 17 bp, synthetic construct
  source 1..17: mol_type = other DNA
ggctccgtggtggtgcc

SEQ ID NO: 178321 - DNA, 17 bp, synthetic construct
  source 1..17: mol_type = other DNA
aggctccgtggtggtgc

SEQ ID NO: 178322 - DNA, 17 bp, synthetic construct
  source 1..17: mol_type = other DNA
caggctccgtggtggtg

SEQ ID NO: 178323 - DNA, 17 bp, synthetic construct
  source 1..17: mol_type = other DNA
gcaggctccgtggtggt

SEQ ID NO: 178324 - DNA, 17 bp, synthetic construct
  source 1..17: mol_type = other DNA
ggcaggctccgtggtgg

SEQ ID NO: 178325 - DNA, 17 bp, synthetic construct
  source 1..17: mol_type = other DNA
tggcaggctccgtggtg

SEQ ID NO: 178326 - DNA, 17 bp, synthetic construct
  source 1..17: mol_type = other DNA
ctggcaggctccgtggt

SEQ ID NO: 178327 - DNA, 17 bp, synthetic construct
  source 1..17: mol_type = other DNA
gctggcaggctccgtgg

SEQ ID NO: 178328 - DNA, 17 bp, synthetic construct
  source 1..17: mol_type = other DNA
ggctggcaggctccgtg

SEQ ID NO: 178329 - DNA, 17 bp, synthetic construct
  source 1..17: mol_type = other DNA
gggctggcaggctccgt

SEQ ID NO: 178330 - DNA, 17 bp, synthetic construct
  source 1..17: mol_type = other DNA
cgggctggcaggctccg

SEQ ID NO: 178331 - DNA, 17 bp, synthetic construct
  source 1..17: mol_type = other DNA
acgggctggcaggctcc

SEQ ID NO: 178332 - DNA, 17 bp, synthetic construct
  source 1..17: mol_type = other DNA
gacgggctggcaggctc

SEQ ID NO: 178333 - DNA, 17 bp, synthetic construct
  source 1..17: mol_type = other DNA
ggacgggctggcaggct

SEQ ID NO: 178334 - DNA, 17 bp, synthetic construct
  source 1..17: mol_type = other DNA
tggacgggctggcaggc

SEQ ID NO: 178335 - DNA, 17 bp, synthetic construct
  source 1..17: mol_type = other DNA
atggacgggctggcagg

SEQ ID NO: 178336 - DNA, 17 bp, synthetic construct
  source 1..17: mol_type = other DNA
gatggacgggctggcag

SEQ ID NO: 178337 - DNA, 17 bp, synthetic construct
  source 1..17: mol_type = other DNA
agatggacgggctggca

SEQ ID NO: 178338 - DNA, 17 bp, synthetic construct
  source 1..17: mol_type = other DNA
gagatggacgggctggc

SEQ ID NO: 178339 - DNA, 17 bp, synthetic construct
  source 1..17: mol_type = other DNA
agagatggacgggctgg

SEQ ID NO: 178340 - DNA, 17 bp, synthetic construct
  source 1..17: mol_type = other DNA
cagagatggacgggctg

SEQ ID NO: 178341 - DNA, 17 bp, synthetic construct
  source 1..17: mol_type = other DNA
acagagatggacgggct

SEQ ID NO: 178342 - DNA, 17 bp, synthetic construct
  source 1..17: mol_type = other DNA
gacagagatggacgggc

SEQ ID NO: 178343 - DNA, 17 bp, synthetic construct
  source 1..17: mol_type = other DNA
ggacagagatggacggg

SEQ ID NO: 178344 - DNA, 17 bp, synthetic construct
  source 1..17: mol_type = other DNA
gggacagagatggacgg

SEQ ID NO: 178345 - DNA, 17 bp, synthetic construct
  source 1..17: mol_type = other DNA
cgggacagagatggacg

SEQ ID NO: 178346 - DNA, 17 bp, synthetic construct
  source 1..17: mol_type = other DNA
gcgggacagagatggac

SEQ ID NO: 178347 - DNA, 17 bp, synthetic construct
  source 1..17: mol_type = other DNA
tgcgggacagagatgga

SEQ ID NO: 178348 - DNA, 17 bp, synthetic construct
  source 1..17: mol_type = other DNA
ctgcgggacagagatgg

SEQ ID NO: 178349 - DNA, 17 bp, synthetic construct
  source 1..17: mol_type = other DNA
cctgcgggacagagatg

SEQ ID NO: 178350 - DNA, 17 bp, synthetic construct
  source 1..17: mol_type = other DNA
gcctgcgggacagagat

SEQ ID NO: 178351 - DNA, 17 bp, synthetic construct
  source 1..17: mol_type = other DNA
tgcctgcgggacagaga

SEQ ID NO: 178352 - DNA, 17 bp, synthetic construct
  source 1..17: mol_type = other DNA
atgcctgcgggacagag

SEQ ID NO: 178353 - DNA, 17 bp, synthetic construct
  source 1..17: mol_type = other DNA
gatgcctgcgggacaga

SEQ ID NO: 178354 - DNA, 17 bp, synthetic construct
  source 1..17: mol_type = other DNA
agatgcctgcgggacag

SEQ ID NO: 178355 - DNA, 17 bp, synthetic construct
  source 1..17: mol_type = other DNA
cagatgcctgcgggaca

SEQ ID NO: 178356 - DNA, 17 bp, synthetic construct
  source 1..17: mol_type = other DNA
gcagatgcctgcgggac

SEQ ID NO: 178357 - DNA, 17 bp, synthetic construct
  source 1..17: mol_type = other DNA
tgcagatgcctgcggga

SEQ ID NO: 178358 - DNA, 17 bp, synthetic construct
  source 1..17: mol_type = other DNA
ctgcagatgcctgcggg

SEQ ID NO: 178359 - DNA, 17 bp, synthetic construct
  source 1..17: mol_type = other DNA
gctgcagatgcctgcgg

SEQ ID NO: 178360 - DNA, 17 bp, synthetic construct
  source 1..17: mol_type = other DNA
tgctgcagatgcctgcg

SEQ ID NO: 178361 - DNA, 17 bp, synthetic construct
  source 1..17: mol_type = other DNA
atgctgcagatgcctgc

SEQ ID NO: 178362 - DNA, 17 bp, synthetic construct
  source 1..17: mol_type = other DNA
catgctgcagatgcctg

SEQ ID NO: 178363 - DNA, 17 bp, synthetic construct
  source 1..17: mol_type = other DNA
acatgctgcagatgcct

SEQ ID NO: 178364 - DNA, 17 bp, synthetic construct
  source 1..17: mol_type = other DNA
cacatgctgcagatgcc

SEQ ID NO: 178365 - DNA, 17 bp, synthetic construct
  source 1..17: mol_type = other DNA
ccacatgctgcagatgc

SEQ ID NO: 178366 - DNA, 17 bp, synthetic construct
  source 1..17: mol_type = other DNA
cccacatgctgcagatg

SEQ ID NO: 178367 - DNA, 17 bp, synthetic construct
  source 1..17: mol_type = other DNA
ccccacatgctgcagat

SEQ ID NO: 178368 - DNA, 17 bp, synthetic construct
  source 1..17: mol_type = other DNA
gccccacatgctgcaga

SEQ ID NO: 178369 - DNA, 17 bp, synthetic construct
  source 1..17: mol_type = other DNA
cgccccacatgctgcag

SEQ ID NO: 178370 - DNA, 17 bp, synthetic construct
  source 1..17: mol_type = other DNA
ccgccccacatgctgca

SEQ ID NO: 178371 - DNA, 17 bp, synthetic construct
  source 1..17: mol_type = other DNA
gccgccccacatgctgc

SEQ ID NO: 178372 - DNA, 17 bp, synthetic construct
  source 1..17: mol_type = other DNA
agccgccccacatgctg

SEQ ID NO: 178373 - DNA, 17 bp, synthetic construct
  source 1..17: mol_type = other DNA
gagccgccccacatgct

SEQ ID NO: 178374 - DNA, 17 bp, synthetic construct
  source 1..17: mol_type = other DNA
ggagccgccccacatgc

SEQ ID NO: 178375 - DNA, 17 bp, synthetic construct
  source 1..17: mol_type = other DNA
gggagccgccccacatg

SEQ ID NO: 178376 - DNA, 17 bp, synthetic construct
  source 1..17: mol_type = other DNA
tgggagccgccccacat

SEQ ID NO: 178377 - DNA, 17 bp, synthetic construct
  source 1..17: mol_type = other DNA
gtgggagccgccccaca

SEQ ID NO: 178378 - DNA, 17 bp, synthetic construct
  source 1..17: mol_type = other DNA
agtgggagccgccccac

SEQ ID NO: 178379 - DNA, 17 bp, synthetic construct
  source 1..17: mol_type = other DNA
tagtgggagccgcccca

SEQ ID NO: 178380 - DNA, 17 bp, synthetic construct
  source 1..17: mol_type = other DNA
atagtgggagccgcccc

SEQ ID NO: 178381 - DNA, 17 bp, synthetic construct
  source 1..17: mol_type = other DNA
aatagtgggagccgccc

SEQ ID NO: 178382 - DNA, 17 bp, synthetic construct
  source 1..17: mol_type = other DNA
gaatagtgggagccgcc

SEQ ID NO: 178383 - DNA, 17 bp, synthetic construct
  source 1..17: mol_type = other DNA
ggaatagtgggagccgc

SEQ ID NO: 178384 - DNA, 17 bp, synthetic construct
  source 1..17: mol_type = other DNA
tggaatagtgggagccg

SEQ ID NO: 178385 - DNA, 17 bp, synthetic construct
  source 1..17: mol_type = other DNA
gtggaatagtgggagcc

SEQ ID NO: 178386 - DNA, 17 bp, synthetic construct
  source 1..17: mol_type = other DNA
ggtggaatagtgggagc

SEQ ID NO: 178387 - DNA, 17 bp, synthetic construct
  source 1..17: mol_type = other DNA
aggtggaatagtgggag

SEQ ID NO: 178388 - DNA, 17 bp, synthetic construct
  source 1..17: mol_type = other DNA
aaggtggaatagtggga

SEQ ID NO: 178389 - DNA, 17 bp, synthetic construct
  source 1..17: mol_type = other DNA
aaaggtggaatagtggg

SEQ ID NO: 178390 - DNA, 17 bp, synthetic construct
  source 1..17: mol_type = other DNA
caaaggtggaatagtgg

SEQ ID NO: 178391 - DNA, 17 bp, synthetic construct
  source 1..17: mol_type = other DNA
tcaaaggtggaatagtg

SEQ ID NO: 178392 - DNA, 17 bp, synthetic construct
  source 1..17: mol_type = other DNA
gtcaaaggtggaatagt

SEQ ID NO: 178393 - DNA, 17 bp, synthetic construct
  source 1..17: mol_type = other DNA
cgtcaaaggtggaatag

SEQ ID NO: 178394 - DNA, 17 bp, synthetic construct
  source 1..17: mol_type = other DNA
ccgtcaaaggtggaata

SEQ ID NO: 178395 - DNA, 17 bp, synthetic construct
  source 1..17: mol_type = other DNA
gccgtcaaaggtggaat

SEQ ID NO: 178396 - DNA, 17 bp, synthetic construct
  source 1..17: mol_type = other DNA
tgccgtcaaaggtggaa

SEQ ID NO: 178397 - DNA, 17 bp, synthetic construct
  source 1..17: mol_type = other DNA
gtgccgtcaaaggtgga

SEQ ID NO: 178398 - DNA, 17 bp, synthetic construct
  source 1..17: mol_type = other DNA
ggtgccgtcaaaggtgg

SEQ ID NO: 178399 - DNA, 17 bp, synthetic construct
  source 1..17: mol_type = other DNA
aggtgccgtcaaaggtg

SEQ ID NO: 178400 - DNA, 17 bp, synthetic construct
  source 1..17: mol_type = other DNA
gaggtgccgtcaaaggt

SEQ ID NO: 178401 - DNA, 17 bp, synthetic construct
  source 1..17: mol_type = other DNA
agaggtgccgtcaaagg

SEQ ID NO: 178402 - DNA, 17 bp, synthetic construct
  source 1..17: mol_type = other DNA
aagaggtgccgtcaaag

SEQ ID NO: 178403 - DNA, 17 bp, synthetic construct
  source 1..17: mol_type = other DNA
taagaggtgccgtcaaa

SEQ ID NO: 178404 - DNA, 17 bp, synthetic construct
  source 1..17: mol_type = other DNA
gtaagaggtgccgtcaa

SEQ ID NO: 178405 - DNA, 17 bp, synthetic construct
  source 1..17: mol_type = other DNA
tgtaagaggtgccgtca

SEQ ID NO: 178406 - DNA, 17 bp, synthetic construct
  source 1..17: mol_type = other DNA
gtgtaagaggtgccgtc

SEQ ID NO: 178407 - DNA, 17 bp, synthetic construct
  source 1..17: mol_type = other DNA
ggtgtaagaggtgccgt

SEQ ID NO: 178408 - DNA, 17 bp, synthetic construct
  source 1..17: mol_type = other DNA
aggtgtaagaggtgccg

SEQ ID NO: 178409 - DNA, 17 bp, synthetic construct
  source 1..17: mol_type = other DNA
aaggtgtaagaggtgcc

SEQ ID NO: 178410 - DNA, 17 bp, synthetic construct
  source 1..17: mol_type = other DNA
gaaggtgtaagaggtgc

SEQ ID NO: 178411 - DNA, 17 bp, synthetic construct
  source 1..17: mol_type = other DNA
ggaaggtgtaagaggtg

SEQ ID NO: 178412 - DNA, 17 bp, synthetic construct
  source 1..17: mol_type = other DNA
cggaaggtgtaagaggt

SEQ ID NO: 178413 - DNA, 17 bp, synthetic construct
  source 1..17: mol_type = other DNA
ccggaaggtgtaagagg

SEQ ID NO: 178414 - DNA, 17 bp, synthetic construct
  source 1..17: mol_type = other DNA
cccggaaggtgtaagag

SEQ ID NO: 178415 - DNA, 17 bp, synthetic construct
  source 1..17: mol_type = other DNA
ccccggaaggtgtaaga

SEQ ID NO: 178416 - DNA, 17 bp, synthetic construct
  source 1..17: mol_type = other DNA
gccccggaaggtgtaag

SEQ ID NO: 178417 - DNA, 17 bp, synthetic construct
  source 1..17: mol_type = other DNA
tgccccggaaggtgtaa

SEQ ID NO: 178418 - DNA, 17 bp, synthetic construct
  source 1..17: mol_type = other DNA
ttgccccggaaggtgta

SEQ ID NO: 178419 - DNA, 17 bp, synthetic construct
  source 1..17: mol_type = other DNA
gttgccccggaaggtgt

SEQ ID NO: 178420 - DNA, 17 bp, synthetic construct
  source 1..17: mol_type = other DNA
agttgccccggaaggtg

SEQ ID NO: 178421 - DNA, 17 bp, synthetic construct
  source 1..17: mol_type = other DNA
cagttgccccggaaggt

SEQ ID NO: 178422 - DNA, 17 bp, synthetic construct
  source 1..17: mol_type = other DNA
gcagttgccccggaagg

SEQ ID NO: 178423 - DNA, 17 bp, synthetic construct
  source 1..17: mol_type = other DNA
tgcagttgccccggaag

SEQ ID NO: 178424 - DNA, 17 bp, synthetic construct
  source 1..17: mol_type = other DNA
gtgcagttgccccggaa

SEQ ID NO: 178425 - DNA, 17 bp, synthetic construct
  source 1..17: mol_type = other DNA
ggtgcagttgccccgga

SEQ ID NO: 178426 - DNA, 17 bp, synthetic construct
  source 1..17: mol_type = other DNA
aggtgcagttgccccgg

SEQ ID NO: 178427 - DNA, 17 bp, synthetic construct
  source 1..17: mol_type = other DNA
taggtgcagttgccccg

SEQ ID NO: 178428 - DNA, 17 bp, synthetic construct
  source 1..17: mol_type = other DNA
ataggtgcagttgcccc

SEQ ID NO: 178429 - DNA, 17 bp, synthetic construct
  source 1..17: mol_type = other DNA
cataggtgcagttgccc

SEQ ID NO: 178430 - DNA, 17 bp, synthetic construct
  source 1..17: mol_type = other DNA
acataggtgcagttgcc

SEQ ID NO: 178431 - DNA, 17 bp, synthetic construct
  source 1..17: mol_type = other DNA
gacataggtgcagttgc

SEQ ID NO: 178432 - DNA, 17 bp, synthetic construct
  source 1..17: mol_type = other DNA
ggacataggtgcagttg

SEQ ID NO: 178433 - DNA, 17 bp, synthetic construct
  source 1..17: mol_type = other DNA
aggacataggtgcagtt

SEQ ID NO: 178434 - DNA, 17 bp, synthetic construct
  source 1..17: mol_type = other DNA
gaggacataggtgcagt

SEQ ID NO: 178435 - DNA, 17 bp, synthetic construct
  source 1..17: mol_type = other DNA
tgaggacataggtgcag

SEQ ID NO: 178436 - DNA, 17 bp, synthetic construct
  source 1..17: mol_type = other DNA
atgaggacataggtgca

SEQ ID NO: 178437 - DNA, 17 bp, synthetic construct
  source 1..17: mol_type = other DNA
catgaggacataggtgc

SEQ ID NO: 178438 - DNA, 17 bp, synthetic construct
  source 1..17: mol_type = other DNA
tcatgaggacataggtg

SEQ ID NO: 178439 - DNA, 17 bp, synthetic construct
  source 1..17: mol_type = other DNA
ctcatgaggacataggt

SEQ ID NO: 178440 - DNA, 17 bp, synthetic construct
  source 1..17: mol_type = other DNA
tctcatgaggacatagg

SEQ ID NO: 178441 - DNA, 17 bp, synthetic construct
  source 1..17: mol_type = other DNA
ctctcatgaggacatag

SEQ ID NO: 178442 - DNA, 17 bp, synthetic construct
  source 1..17: mol_type = other DNA
tctctcatgaggacata

SEQ ID NO: 178443 - DNA, 17 bp, synthetic construct
  source 1..17: mol_type = other DNA
ctctctcatgaggacat

SEQ ID NO: 178444 - DNA, 17 bp, synthetic construct
  source 1..17: mol_type = other DNA
tctctctcatgaggaca

SEQ ID NO: 178445 - DNA, 17 bp, synthetic construct
  source 1..17: mol_type = other DNA
atctctctcatgaggac

SEQ ID NO: 178446 - DNA, 17 bp, synthetic construct
  source 1..17: mol_type = other DNA
gatctctctcatgagga

SEQ ID NO: 178447 - DNA, 17 bp, synthetic construct
  source 1..17: mol_type = other DNA
ggatctctctcatgagg

SEQ ID NO: 178448 - DNA, 17 bp, synthetic construct
  source 1..17: mol_type = other DNA
tggatctctctcatgag

SEQ ID NO: 178449 - DNA, 17 bp, synthetic construct
  source 1..17: mol_type = other DNA
atggatctctctcatga

SEQ ID NO: 178450 - DNA, 17 bp, synthetic construct
  source 1..17: mol_type = other DNA
catggatctctctcatg

SEQ ID NO: 178451 - DNA, 17 bp, synthetic construct
  source 1..17: mol_type = other DNA
gcatggatctctctcat

SEQ ID NO: 178452 - DNA, 17 bp, synthetic construct
  source 1..17: mol_type = other DNA
tgcatggatctctctca

SEQ ID NO: 178453 - DNA, 17 bp, synthetic construct
  source 1..17: mol_type = other DNA
gtgcatggatctctctc

SEQ ID NO: 178454 - DNA, 17 bp, synthetic construct
  source 1..17: mol_type = other DNA
cgtgcatggatctctct

SEQ ID NO: 178455 - DNA, 17 bp, synthetic construct
  source 1..17: mol_type = other DNA
gcgtgcatggatctctc

SEQ ID NO: 178456 - DNA, 17 bp, synthetic construct
  source 1..17: mol_type = other DNA
agcgtgcatggatctct

SEQ ID NO: 178457 - DNA, 17 bp, synthetic construct
  source 1..17: mol_type = other DNA
aagcgtgcatggatctc

SEQ ID NO: 178458 - DNA, 17 bp, synthetic construct
  source 1..17: mol_type = other DNA
aaagcgtgcatggatct

SEQ ID NO: 178459 - DNA, 17 bp, synthetic construct
  source 1..17: mol_type = other DNA
caaagcgtgcatggatc

SEQ ID NO: 178460 - DNA, 17 bp, synthetic construct
  source 1..17: mol_type = other DNA
ccaaagcgtgcatggat

SEQ ID NO: 178461 - DNA, 17 bp, synthetic construct
  source 1..17: mol_type = other DNA
cccaaagcgtgcatgga

SEQ ID NO: 178462 - DNA, 17 bp, synthetic construct
  source 1..17: mol_type = other DNA
tcccaaagcgtgcatgg

SEQ ID NO: 178463 - DNA, 17 bp, synthetic construct
  source 1..17: mol_type = other DNA
ttcccaaagcgtgcatg

SEQ ID NO: 178464 - DNA, 17 bp, synthetic construct
  source 1..17: mol_type = other DNA
attcccaaagcgtgcat

SEQ ID NO: 178465 - DNA, 17 bp, synthetic construct
  source 1..17: mol_type = other DNA
gattcccaaagcgtgca

SEQ ID NO: 178466 - DNA, 17 bp, synthetic construct
  source 1..17: mol_type = other DNA
agattcccaaagcgtgc

SEQ ID NO: 178467 - DNA, 17 bp, synthetic construct
  source 1..17: mol_type = other DNA
gagattcccaaagcgtg

SEQ ID NO: 178468 - DNA, 17 bp, synthetic construct
  source 1..17: mol_type = other DNA
tgagattcccaaagcgt

SEQ ID NO: 178469 - DNA, 17 bp, synthetic construct
  source 1..17: mol_type = other DNA
ctgagattcccaaagcg

SEQ ID NO: 178470 - DNA, 17 bp, synthetic construct
  source 1..17: mol_type = other DNA
gctgagattcccaaagc

SEQ ID NO: 178471 - DNA, 17 bp, synthetic construct
  source 1..17: mol_type = other DNA
ggctgagattcccaaag

SEQ ID NO: 178472 - DNA, 17 bp, synthetic construct
  source 1..17: mol_type = other DNA
aggctgagattcccaaa

SEQ ID NO: 178473 - DNA, 17 bp, synthetic construct
  source 1..17: mol_type = other DNA
gaggctgagattcccaa

SEQ ID NO: 178474 - DNA, 17 bp, synthetic construct
  source 1..17: mol_type = other DNA
agaggctgagattccca

SEQ ID NO: 178475 - DNA, 17 bp, synthetic construct
  source 1..17: mol_type = other DNA
tagaggctgagattccc

SEQ ID NO: 178476 - DNA, 17 bp, synthetic construct
  source 1..17: mol_type = other DNA
gtagaggctgagattcc

SEQ ID NO: 178477 - DNA, 17 bp, synthetic construct
  source 1..17: mol_type = other DNA
ggtagaggctgagattc

SEQ ID NO: 178478 - DNA, 17 bp, synthetic construct
  source 1..17: mol_type = other DNA
aggtagaggctgagatt

SEQ ID NO: 178479 - DNA, 17 bp, synthetic construct
  source 1..17: mol_type = other DNA
caggtagaggctgagat

SEQ ID NO: 178480 - DNA, 17 bp, synthetic construct
  source 1..17: mol_type = other DNA
ccaggtagaggctgaga

SEQ ID NO: 178481 - DNA, 17 bp, synthetic construct
  source 1..17: mol_type = other DNA
tccaggtagaggctgag

SEQ ID NO: 178482 - DNA, 17 bp, synthetic construct
  source 1..17: mol_type = other DNA
gtccaggtagaggctga

SEQ ID NO: 178483 - DNA, 17 bp, synthetic construct
  source 1..17: mol_type = other DNA
tgtccaggtagaggctg

SEQ ID NO: 178484 - DNA, 17 bp, synthetic construct
  source 1..17: mol_type = other DNA
ttgtccaggtagaggct

SEQ ID NO: 178485 - DNA, 17 bp, synthetic construct
  source 1..17: mol_type = other DNA
gttgtccaggtagaggc

SEQ ID NO: 178486 - DNA, 17 bp, synthetic construct
  source 1..17: mol_type = other DNA
ggttgtccaggtagagg

SEQ ID NO: 178487 - DNA, 17 bp, synthetic construct
  source 1..17: mol_type = other DNA
tggttgtccaggtagag

SEQ ID NO: 178488 - DNA, 17 bp, synthetic construct
  source 1..17: mol_type = other DNA
gtggttgtccaggtaga

SEQ ID NO: 178489 - DNA, 17 bp, synthetic construct
  source 1..17: mol_type = other DNA
agtggttgtccaggtag

SEQ ID NO: 178490 - DNA, 17 bp, synthetic construct
  source 1..17: mol_type = other DNA
tagtggttgtccaggta

SEQ ID NO: 178491 - DNA, 17 bp, synthetic construct
  source 1..17: mol_type = other DNA
gtagtggttgtccaggt

SEQ ID NO: 178492 - DNA, 17 bp, synthetic construct
  source 1..17: mol_type = other DNA
agtagtggttgtccagg

SEQ ID NO: 178493 - DNA, 17 bp, synthetic construct
  source 1..17: mol_type = other DNA
cagtagtggttgtccag

SEQ ID NO: 178494 - DNA, 17 bp, synthetic construct
  source 1..17: mol_type = other DNA
gcagtagtggttgtcca

SEQ ID NO: 178495 - DNA, 17 bp, synthetic construct
  source 1..17: mol_type = other DNA
tgcagtagtggttgtcc

SEQ ID NO: 178496 - DNA, 17 bp, synthetic construct
  source 1..17: mol_type = other DNA
gtgcagtagtggttgtc

SEQ ID NO: 178497 - DNA, 17 bp, synthetic construct
  source 1..17: mol_type = other DNA
cgtgcagtagtggttgt

SEQ ID NO: 178498 - DNA, 17 bp, synthetic construct
  source 1..17: mol_type = other DNA
ccgtgcagtagtggttg

SEQ ID NO: 178499 - DNA, 17 bp, synthetic construct
  source 1..17: mol_type = other DNA
gccgtgcagtagtggtt

SEQ ID NO: 178500 - DNA, 17 bp, synthetic construct
  source 1..17: mol_type = other DNA
ggccgtgcagtagtggt

SEQ ID NO: 178501 - DNA, 17 bp, synthetic construct
  source 1..17: mol_type = other DNA
aggccgtgcagtagtgg

SEQ ID NO: 178502 - DNA, 17 bp, synthetic construct
  source 1..17: mol_type = other DNA
gaggccgtgcagtagtg

SEQ ID NO: 178503 - DNA, 17 bp, synthetic construct
  source 1..17: mol_type = other DNA
agaggccgtgcagtagt

SEQ ID NO: 178504 - DNA, 17 bp, synthetic construct
  source 1..17: mol_type = other DNA
cagaggccgtgcagtag

SEQ ID NO: 178505 - DNA, 17 bp, synthetic construct
  source 1..17: mol_type = other DNA
gcagaggccgtgcagta

SEQ ID NO: 178506 - DNA, 17 bp, synthetic construct
  source 1..17: mol_type = other DNA
ggcagaggccgtgcagt

SEQ ID NO: 178507 - DNA, 17 bp, synthetic construct
  source 1..17: mol_type = other DNA
tggcagaggccgtgcag

SEQ ID NO: 178508 - DNA, 17 bp, synthetic construct
  source 1..17: mol_type = other DNA
gtggcagaggccgtgca

SEQ ID NO: 178509 - DNA, 17 bp, synthetic construct
  source 1..17: mol_type = other DNA
agtggcagaggccgtgc

SEQ ID NO: 178510 - DNA, 17 bp, synthetic construct
  source 1..17: mol_type = other DNA
cagtggcagaggccgtg

SEQ ID NO: 178511 - DNA, 17 bp, synthetic construct
  source 1..17: mol_type = other DNA
gcagtggcagaggccgt

SEQ ID NO: 178512 - DNA, 17 bp, synthetic construct
  source 1..17: mol_type = other DNA
ggcagtggcagaggccg

SEQ ID NO: 178513 - DNA, 17 bp, synthetic construct
  source 1..17: mol_type = other DNA
cggcagtggcagaggcc

SEQ ID NO: 178514 - DNA, 17 bp, synthetic construct
  source 1..17: mol_type = other DNA
gcggcagtggcagaggc

SEQ ID NO: 178515 - DNA, 17 bp, synthetic construct
  source 1..17: mol_type = other DNA
agcggcagtggcagagg

SEQ ID NO: 178516 - DNA, 17 bp, synthetic construct
  source 1..17: mol_type = other DNA
cagcggcagtggcagag

SEQ ID NO: 178517 - DNA, 17 bp, synthetic construct
  source 1..17: mol_type = other DNA
gcagcggcagtggcaga

SEQ ID NO: 178518 - DNA, 17 bp, synthetic construct
  source 1..17: mol_type = other DNA
ggcagcggcagtggcag

SEQ ID NO: 178519 - DNA, 17 bp, synthetic construct
  source 1..17: mol_type = other DNA
cggcagcggcagtggca

SEQ ID NO: 178520 - DNA, 17 bp, synthetic construct
  source 1..17: mol_type = other DNA
gcggcagcggcagtggc

SEQ ID NO: 178521 - DNA, 17 bp, synthetic construct
  source 1..17: mol_type = other DNA
ggcggcagcggcagtgg

SEQ ID NO: 178522 - DNA, 17 bp, synthetic construct
  source 1..17: mol_type = other DNA
gggcggcagcggcagtg

SEQ ID NO: 178523 - DNA, 17 bp, synthetic construct
  source 1..17: mol_type = other DNA
cgggcggcagcggcagt

SEQ ID NO: 178524 - DNA, 17 bp, synthetic construct
  source 1..17: mol_type = other DNA
gcgggcggcagcggcag

SEQ ID NO: 178525 - DNA, 17 bp, synthetic construct
  source 1..17: mol_type = other DNA
agcgggcggcagcggca

SEQ ID NO: 178526 - DNA, 17 bp, synthetic construct
  source 1..17: mol_type = other DNA
cagcgggcggcagcggc

SEQ ID NO: 178527 - DNA, 17 bp, synthetic construct
  source 1..17: mol_type = other DNA
gcagcgggcggcagcgg

SEQ ID NO: 178528 - DNA, 17 bp, synthetic construct
  source 1..17: mol_type = other DNA
ggcagcgggcggcagcg

SEQ ID NO: 178529 - DNA, 17 bp, synthetic construct
  source 1..17: mol_type = other DNA
gggcagcgggcggcagc

SEQ ID NO: 178530 - DNA, 17 bp, synthetic construct
  source 1..17: mol_type = other DNA
ggggcagcgggcggcag

SEQ ID NO: 178531 - DNA, 17 bp, synthetic construct
  source 1..17: mol_type = other DNA
gggggcagcgggcggca

SEQ ID NO: 178532 - DNA, 17 bp, synthetic construct
  source 1..17: mol_type = other DNA
cgggggcagcgggcggc

SEQ ID NO: 178533 - DNA, 17 bp, synthetic construct
  source 1..17: mol_type = other DNA
gcgggggcagcgggcgg

SEQ ID NO: 178534 - DNA, 17 bp, synthetic construct
  source 1..17: mol_type = other DNA
cgcgggggcagcgggcg

SEQ ID NO: 178535 - DNA, 17 bp, synthetic construct
  source 1..17: mol_type = other DNA
gcgcgggggcagcgggc

SEQ ID NO: 178536 - DNA, 17 bp, synthetic construct
  source 1..17: mol_type = other DNA
ggcgcgggggcagcggg

SEQ ID NO: 178537 - DNA, 17 bp, synthetic construct
  source 1..17: mol_type = other DNA
gggcgcgggggcagcgg

SEQ ID NO: 178538 - DNA, 17 bp, synthetic construct
  source 1..17: mol_type = other DNA
agggcgcgggggcagcg

SEQ ID NO: 178539 - DNA, 17 bp, synthetic construct
  source 1..17: mol_type = other DNA
gagggcgcgggggcagc

SEQ ID NO: 178540 - DNA, 17 bp, synthetic construct
  source 1..17: mol_type = other DNA
tgagggcgcgggggcag

SEQ ID NO: 178541 - DNA, 17 bp, synthetic construct
  source 1..17: mol_type = other DNA
ctgagggcgcgggggca

SEQ ID NO: 178542 - DNA, 17 bp, synthetic construct
  source 1..17: mol_type = other DNA
gctgagggcgcgggggc

SEQ ID NO: 178543 - DNA, 17 bp, synthetic construct
  source 1..17: mol_type = other DNA
tgctgagggcgcggggg

SEQ ID NO: 178544 - DNA, 17 bp, synthetic construct
  source 1..17: mol_type = other DNA
atgctgagggcgcgggg

SEQ ID NO: 178545 - DNA, 17 bp, synthetic construct
  source 1..17: mol_type = other DNA
gatgctgagggcgcggg

SEQ ID NO: 178546 - DNA, 17 bp, synthetic construct
  source 1..17: mol_type = other DNA
ggatgctgagggcgcgg

SEQ ID NO: 178547 - DNA, 17 bp, synthetic construct
  source 1..17: mol_type = other DNA
tggatgctgagggcgcg

SEQ ID NO: 178548 - DNA, 17 bp, synthetic construct
  source 1..17: mol_type = other DNA
gtggatgctgagggcgc

SEQ ID NO: 178549 - DNA, 17 bp, synthetic construct
  source 1..17: mol_type = other DNA
agtggatgctgagggcg

SEQ ID NO: 178550 - DNA, 17 bp, synthetic construct
  source 1..17: mol_type = other DNA
tagtggatgctgagggc

SEQ ID NO: 178551 - DNA, 17 bp, synthetic construct
  source 1..17: mol_type = other DNA
gtagtggatgctgaggg

SEQ ID NO: 178552 - DNA, 17 bp, synthetic construct
  source 1..17: mol_type = other DNA
tgtagtggatgctgagg

SEQ ID NO: 178553 - DNA, 17 bp, synthetic construct
  source 1..17: mol_type = other DNA
ttgtagtggatgctgag

SEQ ID NO: 178554 - DNA, 17 bp, synthetic construct
  source 1..17: mol_type = other DNA
cttgtagtggatgctga

SEQ ID NO: 178555 - DNA, 17 bp, synthetic construct
  source 1..17: mol_type = other DNA
acttgtagtggatgctg

SEQ ID NO: 178556 - DNA, 17 bp, synthetic construct
  source 1..17: mol_type = other DNA
gacttgtagtggatgct

SEQ ID NO: 178557 - DNA, 17 bp, synthetic construct
  source 1..17: mol_type = other DNA
ggacttgtagtggatgc

SEQ ID NO: 178558 - DNA, 17 bp, synthetic construct
  source 1..17: mol_type = other DNA
tggacttgtagtggatg

SEQ ID NO: 178559 - DNA, 17 bp, synthetic construct
  source 1..17: mol_type = other DNA
atggacttgtagtggat

SEQ ID NO: 178560 - DNA, 17 bp, synthetic construct
  source 1..17: mol_type = other DNA
catggacttgtagtgga

SEQ ID NO: 178561 - DNA, 17 bp, synthetic construct
  source 1..17: mol_type = other DNA
ccatggacttgtagtgg

SEQ ID NO: 178562 - DNA, 17 bp, synthetic construct
  source 1..17: mol_type = other DNA
tccatggacttgtagtg

SEQ ID NO: 178563 - DNA, 17 bp, synthetic construct
  source 1..17: mol_type = other DNA
atccatggacttgtagt

SEQ ID NO: 178564 - DNA, 17 bp, synthetic construct
  source 1..17: mol_type = other DNA
tatccatggacttgtag

SEQ ID NO: 178565 - DNA, 17 bp, synthetic construct
  source 1..17: mol_type = other DNA
atatccatggacttgta

SEQ ID NO: 178566 - DNA, 17 bp, synthetic construct
  source 1..17: mol_type = other DNA
gatatccatggacttgt

SEQ ID NO: 178567 - DNA, 17 bp, synthetic construct
  source 1..17: mol_type = other DNA
cgatatccatggacttg

SEQ ID NO: 178568 - DNA, 17 bp, synthetic construct
  source 1..17: mol_type = other DNA
acgatatccatggactt

SEQ ID NO: 178569 - DNA, 17 bp, synthetic construct
  source 1..17: mol_type = other DNA
gacgatatccatggact

SEQ ID NO: 178570 - DNA, 17 bp, synthetic construct
  source 1..17: mol_type = other DNA
ggacgatatccatggac

SEQ ID NO: 178571 - DNA, 17 bp, synthetic construct
  source 1..17: mol_type = other DNA
aggacgatatccatgga

SEQ ID NO: 178572 - DNA, 17 bp, synthetic construct
  source 1..17: mol_type = other DNA
gaggacgatatccatgg

SEQ ID NO: 178573 - DNA, 17 bp, synthetic construct
  source 1..17: mol_type = other DNA
tgaggacgatatccatg

SEQ ID NO: 178574 - DNA, 17 bp, synthetic construct
  source 1..17: mol_type = other DNA
gtgaggacgatatccat

SEQ ID NO: 178575 - DNA, 17 bp, synthetic construct
  source 1..17: mol_type = other DNA
agtgaggacgatatcca

SEQ ID NO: 178576 - DNA, 17 bp, synthetic construct
  source 1..17: mol_type = other DNA
cagtgaggacgatatcc

SEQ ID NO: 178577 - DNA, 17 bp, synthetic construct
  source 1..17: mol_type = other DNA
acagtgaggacgatatc

SEQ ID NO: 178578 - DNA, 17 bp, synthetic construct
  source 1..17: mol_type = other DNA
gacagtgaggacgatat

SEQ ID NO: 178579 - DNA, 17 bp, synthetic construct
  source 1..17: mol_type = other DNA
tgacagtgaggacgata

SEQ ID NO: 178580 - DNA, 17 bp, synthetic construct
  source 1..17: mol_type = other DNA
gtgacagtgaggacgat

SEQ ID NO: 178581 - DNA, 17 bp, synthetic construct
  source 1..17: mol_type = other DNA
ggtgacagtgaggacga

SEQ ID NO: 178582 - DNA, 17 bp, synthetic construct
  source 1..17: mol_type = other DNA
tggtgacagtgaggacg

SEQ ID NO: 178583 - DNA, 17 bp, synthetic construct
  source 1..17: mol_type = other DNA
atggtgacagtgaggac

SEQ ID NO: 178584 - DNA, 17 bp, synthetic construct
  source 1..17: mol_type = other DNA
catggtgacagtgagga

SEQ ID NO: 178585 - DNA, 17 bp, synthetic construct
  source 1..17: mol_type = other DNA
ccatggtgacagtgagg

SEQ ID NO: 178586 - DNA, 17 bp, synthetic construct
  source 1..17: mol_type = other DNA
accatggtgacagtgag

SEQ ID NO: 178587 - DNA, 17 bp, synthetic construct
  source 1..17: mol_type = other DNA
caccatggtgacagtga

SEQ ID NO: 178588 - DNA, 17 bp, synthetic construct
  source 1..17: mol_type = other DNA
gcaccatggtgacagtg

SEQ ID NO: 178589 - DNA, 17 bp, synthetic construct
  source 1..17: mol_type = other DNA
tgcaccatggtgacagt

SEQ ID NO: 178590 - DNA, 17 bp, synthetic construct
  source 1..17: mol_type = other DNA
atgcaccatggtgacag

SEQ ID NO: 178591 - DNA, 17 bp, synthetic construct
  source 1..17: mol_type = other DNA
catgcaccatggtgaca

SEQ ID NO: 178592 - DNA, 17 bp, synthetic construct
  source 1..17: mol_type = other DNA
ccatgcaccatggtgac

SEQ ID NO: 178593 - DNA, 17 bp, synthetic construct
  source 1..17: mol_type = other DNA
cccatgcaccatggtga

SEQ ID NO: 178594 - DNA, 17 bp, synthetic construct
  source 1..17: mol_type = other DNA
tcccatgcaccatggtg

SEQ ID NO: 178595 - DNA, 17 bp, synthetic construct
  source 1..17: mol_type = other DNA
ttcccatgcaccatggt

SEQ ID NO: 178596 - DNA, 17 bp, synthetic construct
  source 1..17: mol_type = other DNA
cttcccatgcaccatgg

SEQ ID NO: 178597 - DNA, 17 bp, synthetic construct
  source 1..17: mol_type = other DNA
ccttcccatgcaccatg

SEQ ID NO: 178598 - DNA, 17 bp, synthetic construct
  source 1..17: mol_type = other DNA
tccttcccatgcaccat

SEQ ID NO: 178599 - DNA, 17 bp, synthetic construct
  source 1..17: mol_type = other DNA
ctccttcccatgcacca

SEQ ID NO: 178600 - DNA, 17 bp, synthetic construct
  source 1..17: mol_type = other DNA
cctccttcccatgcacc

SEQ ID NO: 178601 - DNA, 17 bp, synthetic construct
  source 1..17: mol_type = other DNA
tcctccttcccatgcac

SEQ ID NO: 178602 - DNA, 17 bp, synthetic construct
  source 1..17: mol_type = other DNA
ctcctccttcccatgca

SEQ ID NO: 178603 - DNA, 17 bp, synthetic construct
  source 1..17: mol_type = other DNA
cctcctccttcccatgc

SEQ ID NO: 178604 - DNA, 17 bp, synthetic construct
  source 1..17: mol_type = other DNA
ccctcctccttcccatg

SEQ ID NO: 178605 - DNA, 17 bp, synthetic construct
  source 1..17: mol_type = other DNA
gccctcctccttcccat

SEQ ID NO: 178606 - DNA, 17 bp, synthetic construct
  source 1..17: mol_type = other DNA
ggccctcctccttccca

SEQ ID NO: 178607 - DNA, 17 bp, synthetic construct
  source 1..17: mol_type = other DNA
aggccctcctccttccc

SEQ ID NO: 178608 - DNA, 17 bp, synthetic construct
  source 1..17: mol_type = other DNA
caggccctcctccttcc

SEQ ID NO: 178609 - DNA, 17 bp, synthetic construct
  source 1..17: mol_type = other DNA
ccaggccctcctccttc

SEQ ID NO: 178610 - DNA, 17 bp, synthetic construct
  source 1..17: mol_type = other DNA
accaggccctcctcctt

SEQ ID NO: 178611 - DNA, 17 bp, synthetic construct
  source 1..17: mol_type = other DNA
caccaggccctcctcct

SEQ ID NO: 178612 - DNA, 17 bp, synthetic construct
  source 1..17: mol_type = other DNA
tcaccaggccctcctcc

SEQ ID NO: 178613 - DNA, 17 bp, synthetic construct
  source 1..17: mol_type = other DNA
ctcaccaggccctcctc

SEQ ID NO: 178614 - DNA, 17 bp, synthetic construct
  source 1..17: mol_type = other DNA
actcaccaggccctcct

SEQ ID NO: 178615 - DNA, 17 bp, synthetic construct
  source 1..17: mol_type = other DNA
gactcaccaggccctcc

SEQ ID NO: 178616 - DNA, 17 bp, synthetic construct
  source 1..17: mol_type = other DNA
ggactcaccaggccctc

SEQ ID NO: 178617 - DNA, 17 bp, synthetic construct
  source 1..17: mol_type = other DNA
tggactcaccaggccct

SEQ ID NO: 178618 - DNA, 17 bp, synthetic construct
  source 1..17: mol_type = other DNA
ctggactcaccaggccc

SEQ ID NO: 178619 - DNA, 17 bp, synthetic construct
  source 1..17: mol_type = other DNA
cctggactcaccaggcc

SEQ ID NO: 178620 - DNA, 17 bp, synthetic construct
  source 1..17: mol_type = other DNA
gcctggactcaccaggc

SEQ ID NO: 178621 - DNA, 17 bp, synthetic construct
  source 1..17: mol_type = other DNA
agcctggactcaccagg

SEQ ID NO: 178622 - DNA, 17 bp, synthetic construct
  source 1..17: mol_type = other DNA
cagcctggactcaccag

SEQ ID NO: 178623 - DNA, 17 bp, synthetic construct
  source 1..17: mol_type = other DNA
gcagcctggactcacca

SEQ ID NO: 178624 - DNA, 17 bp, synthetic construct
  source 1..17: mol_type = other DNA
cgcagcctggactcacc

SEQ ID NO: 178625 - DNA, 17 bp, synthetic construct
  source 1..17: mol_type = other DNA
ccgcagcctggactcac

SEQ ID NO: 178626 - DNA, 17 bp, synthetic construct
  source 1..17: mol_type = other DNA
cccgcagcctggactca

SEQ ID NO: 178627 - DNA, 17 bp, synthetic construct
  source 1..17: mol_type = other DNA
acccgcagcctggactc

SEQ ID NO: 178628 - DNA, 17 bp, synthetic construct
  source 1..17: mol_type = other DNA
cacccgcagcctggact

SEQ ID NO: 178629 - DNA, 17 bp, synthetic construct
  source 1..17: mol_type = other DNA
ccacccgcagcctggac

SEQ ID NO: 178630 - DNA, 17 bp, synthetic construct
  source 1..17: mol_type = other DNA
gccacccgcagcctgga

SEQ ID NO: 178631 - DNA, 17 bp, synthetic construct
  source 1..17: mol_type = other DNA
tgccacccgcagcctgg

SEQ ID NO: 178632 - DNA, 17 bp, synthetic construct
  source 1..17: mol_type = other DNA
gtgccacccgcagcctg

SEQ ID NO: 178633 - DNA, 17 bp, synthetic construct
  source 1..17: mol_type = other DNA
tgtgccacccgcagcct

SEQ ID NO: 178634 - DNA, 17 bp, synthetic construct
  source 1..17: mol_type = other DNA
ctgtgccacccgcagcc

SEQ ID NO: 178635 - DNA, 17 bp, synthetic construct
  source 1..17: mol_type = other DNA
actgtgccacccgcagc

SEQ ID NO: 178636 - DNA, 17 bp, synthetic construct
  source 1..17: mol_type = other DNA
cactgtgccacccgcag

SEQ ID NO: 178637 - DNA, 17 bp, synthetic construct
  source 1..17: mol_type = other DNA
acactgtgccacccgca

SEQ ID NO: 178638 - DNA, 17 bp, synthetic construct
  source 1..17: mol_type = other DNA
aacactgtgccacccgc

SEQ ID NO: 178639 - DNA, 17 bp, synthetic construct
  source 1..17: mol_type = other DNA
caacactgtgccacccg

SEQ ID NO: 178640 - DNA, 17 bp, synthetic construct
  source 1..17: mol_type = other DNA
ccaacactgtgccaccc

SEQ ID NO: 178641 - DNA, 17 bp, synthetic construct
  source 1..17: mol_type = other DNA
gccaacactgtgccacc

SEQ ID NO: 178642 - DNA, 17 bp, synthetic construct
  source 1..17: mol_type = other DNA
ggccaacactgtgccac

SEQ ID NO: 178643 - DNA, 17 bp, synthetic construct
  source 1..17: mol_type = other DNA
gggccaacactgtgcca

SEQ ID NO: 178644 - DNA, 17 bp, synthetic construct
  source 1..17: mol_type = other DNA
tgggccaacactgtgcc

SEQ ID NO: 178645 - DNA, 17 bp, synthetic construct
  source 1..17: mol_type = other DNA
ctgggccaacactgtgc

SEQ ID NO: 178646 - DNA, 17 bp, synthetic construct
  source 1..17: mol_type = other DNA
actgggccaacactgtg

SEQ ID NO: 178647 - DNA, 17 bp, synthetic construct
  source 1..17: mol_type = other DNA
gactgggccaacactgt

SEQ ID NO: 178648 - DNA, 17 bp, synthetic construct
  source 1..17: mol_type = other DNA
ggactgggccaacactg

SEQ ID NO: 178649 - DNA, 17 bp, synthetic construct
  source 1..17: mol_type = other DNA
gggactgggccaacact

SEQ ID NO: 178650 - DNA, 17 bp, synthetic construct
  source 1..17: mol_type = other DNA
tgggactgggccaacac

SEQ ID NO: 178651 - DNA, 17 bp, synthetic construct
  source 1..17: mol_type = other DNA
ttgggactgggccaaca

SEQ ID NO: 178652 - DNA, 17 bp, synthetic construct
  source 1..17: mol_type = other DNA
gttgggactgggccaac

SEQ ID NO: 178653 - DNA, 17 bp, synthetic construct
  source 1..17: mol_type = other DNA
ggttgggactgggccaa

SEQ ID NO: 178654 - DNA, 17 bp, synthetic construct
  source 1..17: mol_type = other DNA
cggttgggactgggcca

SEQ ID NO: 178655 - DNA, 17 bp, synthetic construct
  source 1..17: mol_type = other DNA
gcggttgggactgggcc

SEQ ID NO: 178656 - DNA, 17 bp, synthetic construct
  source 1..17: mol_type = other DNA
tgcggttgggactgggc

SEQ ID NO: 178657 - DNA, 17 bp, synthetic construct
  source 1..17: mol_type = other DNA
gtgcggttgggactggg

SEQ ID NO: 178658 - DNA, 17 bp, synthetic construct
  source 1..17: mol_type = other DNA
ggtgcggttgggactgg

SEQ ID NO: 178659 - DNA, 17 bp, synthetic construct
  source 1..17: mol_type = other DNA
aggtgcggttgggactg

SEQ ID NO: 178660 - DNA, 17 bp, synthetic construct
  source 1..17: mol_type = other DNA
caggtgcggttgggact

SEQ ID NO: 178661 - DNA, 17 bp, synthetic construct
  source 1..17: mol_type = other DNA
ccaggtgcggttgggac

SEQ ID NO: 178662 - DNA, 17 bp, synthetic construct
  source 1..17: mol_type = other DNA
cccaggtgcggttggga

SEQ ID NO: 178663 - DNA, 17 bp, synthetic construct
  source 1..17: mol_type = other DNA
gcccaggtgcggttggg

SEQ ID NO: 178664 - DNA, 17 bp, synthetic construct
  source 1..17: mol_type = other DNA
tgcccaggtgcggttgg

SEQ ID NO: 178665 - DNA, 17 bp, synthetic construct
  source 1..17: mol_type = other DNA
ctgcccaggtgcggttg

SEQ ID NO: 178666 - DNA, 17 bp, synthetic construct
  source 1..17: mol_type = other DNA
cctgcccaggtgcggtt

SEQ ID NO: 178667 - DNA, 17 bp, synthetic construct
  source 1..17: mol_type = other DNA
gcctgcccaggtgcggt

SEQ ID NO: 178668 - DNA, 17 bp, synthetic construct
  source 1..17: mol_type = other DNA
ggcctgcccaggtgcgg

SEQ ID NO: 178669 - DNA, 17 bp, synthetic construct
  source 1..17: mol_type = other DNA
cggcctgcccaggtgcg

SEQ ID NO: 178670 - DNA, 17 bp, synthetic construct
  source 1..17: mol_type = other DNA
tcggcctgcccaggtgc

SEQ ID NO: 178671 - DNA, 17 bp, synthetic construct
  source 1..17: mol_type = other DNA
gtcggcctgcccaggtg

SEQ ID NO: 178672 - DNA, 17 bp, synthetic construct
  source 1..17: mol_type = other DNA
agtcggcctgcccaggt

SEQ ID NO: 178673 - DNA, 17 bp, synthetic construct
  source 1..17: mol_type = other DNA
cagtcggcctgcccagg

SEQ ID NO: 178674 - DNA, 17 bp, synthetic construct
  source 1..17: mol_type = other DNA
gcagtcggcctgcccag

SEQ ID NO: 178675 - DNA, 17 bp, synthetic construct
  source 1..17: mol_type = other DNA
tgcagtcggcctgccca

SEQ ID NO: 178676 - DNA, 17 bp, synthetic construct
  source 1..17: mol_type = other DNA
ctgcagtcggcctgccc

SEQ ID NO: 178677 - DNA, 17 bp, synthetic construct
  source 1..17: mol_type = other DNA
cctgcagtcggcctgcc

SEQ ID NO: 178678 - DNA, 17 bp, synthetic construct
  source 1..17: mol_type = other DNA
gcctgcagtcggcctgc

SEQ ID NO: 178679 - DNA, 17 bp, synthetic construct
  source 1..17: mol_type = other DNA
ggcctgcagtcggcctg

SEQ ID NO: 178680 - DNA, 17 bp, synthetic construct
  source 1..17: mol_type = other DNA
cggcctgcagtcggcct

SEQ ID NO: 178681 - DNA, 17 bp, synthetic construct
  source 1..17: mol_type = other DNA
ccggcctgcagtcggcc

SEQ ID NO: 178682 - DNA, 17 bp, synthetic construct
  source 1..17: mol_type = other DNA
cccggcctgcagtcggc

SEQ ID NO: 178683 - DNA, 17 bp, synthetic construct
  source 1..17: mol_type = other DNA
ccccggcctgcagtcgg

SEQ ID NO: 178684 - DNA, 17 bp, synthetic construct
  source 1..17: mol_type = other DNA
accccggcctgcagtcg

SEQ ID NO: 178685 - DNA, 17 bp, synthetic construct
  source 1..17: mol_type = other DNA
caccccggcctgcagtc

SEQ ID NO: 178686 - DNA, 17 bp, synthetic construct
  source 1..17: mol_type = other DNA
tcaccccggcctgcagt

SEQ ID NO: 178687 - DNA, 17 bp, synthetic construct
  source 1..17: mol_type = other DNA
gtcaccccggcctgcag

SEQ ID NO: 178688 - DNA, 17 bp, synthetic construct
  source 1..17: mol_type = other DNA
ggtcaccccggcctgca

SEQ ID NO: 178689 - DNA, 17 bp, synthetic construct
  source 1..17: mol_type = other DNA
gggtcaccccggcctgc

SEQ ID NO: 178690 - DNA, 17 bp, synthetic construct
  source 1..17: mol_type = other DNA
tgggtcaccccggcctg

SEQ ID NO: 178691 - DNA, 17 bp, synthetic construct
  source 1..17: mol_type = other DNA
ctgggtcaccccggcct

SEQ ID NO: 178692 - DNA, 17 bp, synthetic construct
  source 1..17: mol_type = other DNA
cctgggtcaccccggcc

SEQ ID NO: 178693 - DNA, 17 bp, synthetic construct
  source 1..17: mol_type = other DNA
acctgggtcaccccggc

SEQ ID NO: 178694 - DNA, 17 bp, synthetic construct
  source 1..17: mol_type = other DNA
cacctgggtcaccccgg

SEQ ID NO: 178695 - DNA, 17 bp, synthetic construct
  source 1..17: mol_type = other DNA
gcacctgggtcaccccg

SEQ ID NO: 178696 - DNA, 17 bp, synthetic construct
  source 1..17: mol_type = other DNA
ggcacctgggtcacccc

SEQ ID NO: 178697 - DNA, 17 bp, synthetic construct
  source 1..17: mol_type = other DNA
cggcacctgggtcaccc

SEQ ID NO: 178698 - DNA, 17 bp, synthetic construct
  source 1..17: mol_type = other DNA
gcggcacctgggtcacc

SEQ ID NO: 178699 - DNA, 17 bp, synthetic construct
  source 1..17: mol_type = other DNA
tgcggcacctgggtcac

SEQ ID NO: 178700 - DNA, 17 bp, synthetic construct
  source 1..17: mol_type = other DNA
ctgcggcacctgggtca

SEQ ID NO: 178701 - DNA, 17 bp, synthetic construct
  source 1..17: mol_type = other DNA
gctgcggcacctgggtc

SEQ ID NO: 178702 - DNA, 17 bp, synthetic construct
  source 1..17: mol_type = other DNA
cgctgcggcacctgggt

SEQ ID NO: 178703 - DNA, 17 bp, synthetic construct
  source 1..17: mol_type = other DNA
tcgctgcggcacctggg

SEQ ID NO: 178704 - DNA, 17 bp, synthetic construct
  source 1..17: mol_type = other DNA
atcgctgcggcacctgg

SEQ ID NO: 178705 - DNA, 17 bp, synthetic construct
  source 1..17: mol_type = other DNA
catcgctgcggcacctg

SEQ ID NO: 178706 - DNA, 17 bp, synthetic construct
  source 1..17: mol_type = other DNA
ccatcgctgcggcacct

SEQ ID NO: 178707 - DNA, 17 bp, synthetic construct
  source 1..17: mol_type = other DNA
gccatcgctgcggcacc

SEQ ID NO: 178708 - DNA, 17 bp, synthetic construct
  source 1..17: mol_type = other DNA
ggccatcgctgcggcac

SEQ ID NO: 178709 - DNA, 17 bp, synthetic construct
  source 1..17: mol_type = other DNA
gggccatcgctgcggca

SEQ ID NO: 178710 - DNA, 17 bp, synthetic construct
  source 1..17: mol_type = other DNA
tgggccatcgctgcggc

SEQ ID NO: 178711 - DNA, 17 bp, synthetic construct
  source 1..17: mol_type = other DNA
ctgggccatcgctgcgg

SEQ ID NO: 178712 - DNA, 17 bp, synthetic construct
  source 1..17: mol_type = other DNA
actgggccatcgctgcg

SEQ ID NO: 178713 - DNA, 17 bp, synthetic construct
  source 1..17: mol_type = other DNA
cactgggccatcgctgc

SEQ ID NO: 178714 - DNA, 17 bp, synthetic construct
  source 1..17: mol_type = other DNA
gcactgggccatcgctg

SEQ ID NO: 178715 - DNA, 17 bp, synthetic construct
  source 1..17: mol_type = other DNA
ggcactgggccatcgct

SEQ ID NO: 178716 - DNA, 17 bp, synthetic construct
  source 1..17: mol_type = other DNA
gggcactgggccatcgc

SEQ ID NO: 178717 - DNA, 17 bp, synthetic construct
  source 1..17: mol_type = other DNA
tgggcactgggccatcg

SEQ ID NO: 178718 - DNA, 17 bp, synthetic construct
  source 1..17: mol_type = other DNA
ttgggcactgggccatc

SEQ ID NO: 178719 - DNA, 17 bp, synthetic construct
  source 1..17: mol_type = other DNA
cttgggcactgggccat

SEQ ID NO: 178720 - DNA, 17 bp, synthetic construct
  source 1..17: mol_type = other DNA
tcttgggcactgggcca

SEQ ID NO: 178721 - DNA, 17 bp, synthetic construct
  source 1..17: mol_type = other DNA
gtcttgggcactgggcc

SEQ ID NO: 178722 - DNA, 17 bp, synthetic construct
  source 1..17: mol_type = other DNA
tgtcttgggcactgggc

SEQ ID NO: 178723 - DNA, 17 bp, synthetic construct
  source 1..17: mol_type = other DNA
ctgtcttgggcactggg

SEQ ID NO: 178724 - DNA, 17 bp, synthetic construct
  source 1..17: mol_type = other DNA
gctgtcttgggcactgg

SEQ ID NO: 178725 - DNA, 17 bp, synthetic construct
  source 1..17: mol_type = other DNA
agctgtcttgggcactg

SEQ ID NO: 178726 - DNA, 17 bp, synthetic construct
  source 1..17: mol_type = other DNA
gagctgtcttgggcact

SEQ ID NO: 178727 - DNA, 17 bp, synthetic construct
  source 1..17: mol_type = other DNA
ggagctgtcttgggcac

SEQ ID NO: 178728 - DNA, 17 bp, synthetic construct
  source 1..17: mol_type = other DNA
gggagctgtcttgggca

SEQ ID NO: 178729 - DNA, 17 bp, synthetic construct
  source 1..17: mol_type = other DNA
tgggagctgtcttgggc

SEQ ID NO: 178730 - DNA, 17 bp, synthetic construct
  source 1..17: mol_type = other DNA
ctgggagctgtcttggg

SEQ ID NO: 178731 - DNA, 17 bp, synthetic construct
  source 1..17: mol_type = other DNA
cctgggagctgtcttgg

SEQ ID NO: 178732 - DNA, 17 bp, synthetic construct
  source 1..17: mol_type = other DNA
ccctgggagctgtcttg

SEQ ID NO: 178733 - DNA, 17 bp, synthetic construct
  source 1..17: mol_type = other DNA
cccctgggagctgtctt

SEQ ID NO: 178734 - DNA, 17 bp, synthetic construct
  source 1..17: mol_type = other DNA
ccccctgggagctgtct

SEQ ID NO: 178735 - DNA, 17 bp, synthetic construct
  source 1..17: mol_type = other DNA
gccccctgggagctgtc

SEQ ID NO: 178736 - DNA, 17 bp, synthetic construct
  source 1..17: mol_type = other DNA
tgccccctgggagctgt

SEQ ID NO: 178737 - DNA, 17 bp, synthetic construct
  source 1..17: mol_type = other DNA
ctgccccctgggagctg

SEQ ID NO: 178738 - DNA, 17 bp, synthetic construct
  source 1..17: mol_type = other DNA
cctgccccctgggagct

SEQ ID NO: 178739 - DNA, 17 bp, synthetic construct
  source 1..17: mol_type = other DNA
ccctgccccctgggagc

SEQ ID NO: 178740 - DNA, 17 bp, synthetic construct
  source 1..17: mol_type = other DNA
tccctgccccctgggag

SEQ ID NO: 178741 - DNA, 17 bp, synthetic construct
  source 1..17: mol_type = other DNA
ttccctgccccctggga

SEQ ID NO: 178742 - DNA, 17 bp, synthetic construct
  source 1..17: mol_type = other DNA
cttccctgccccctggg

SEQ ID NO: 178743 - DNA, 17 bp, synthetic construct
  source 1..17: mol_type = other DNA
ccttccctgccccctgg

SEQ ID NO: 178744 - DNA, 17 bp, synthetic construct
  source 1..17: mol_type = other DNA
gccttccctgccccctg

SEQ ID NO: 178745 - DNA, 17 bp, synthetic construct
  source 1..17: mol_type = other DNA
ggccttccctgccccct

SEQ ID NO: 178746 - DNA, 17 bp, synthetic construct
  source 1..17: mol_type = other DNA
aggccttccctgccccc

SEQ ID NO: 178747 - DNA, 17 bp, synthetic construct
  source 1..17: mol_type = other DNA
caggccttccctgcccc

SEQ ID NO: 178748 - DNA, 17 bp, synthetic construct
  source 1..17: mol_type = other DNA
acaggccttccctgccc

SEQ ID NO: 178749 - DNA, 17 bp, synthetic construct
  source 1..17: mol_type = other DNA
cacaggccttccctgcc

SEQ ID NO: 178750 - DNA, 17 bp, synthetic construct
  source 1..17: mol_type = other DNA
ccacaggccttccctgc

SEQ ID NO: 178751 - DNA, 17 bp, synthetic construct
  source 1..17: mol_type = other DNA
tccacaggccttccctg

SEQ ID NO: 178752 - DNA, 17 bp, synthetic construct
  source 1..17: mol_type = other DNA
ctccacaggccttccct

SEQ ID NO: 178753 - DNA, 17 bp, synthetic construct
  source 1..17: mol_type = other DNA
gctccacaggccttccc

SEQ ID NO: 178754 - DNA, 17 bp, synthetic construct
  source 1..17: mol_type = other DNA
ggctccacaggccttcc

SEQ ID NO: 178755 - DNA, 17 bp, synthetic construct
  source 1..17: mol_type = other DNA
cggctccacaggccttc

SEQ ID NO: 178756 - DNA, 17 bp, synthetic construct
  source 1..17: mol_type = other DNA
gcggctccacaggcctt

SEQ ID NO: 178757 - DNA, 17 bp, synthetic construct
  source 1..17: mol_type = other DNA
ggcggctccacaggcct

SEQ ID NO: 178758 - DNA, 17 bp, synthetic construct
  source 1..17: mol_type = other DNA
aggcggctccacaggcc

SEQ ID NO: 178759 - DNA, 17 bp, synthetic construct
  source 1..17: mol_type = other DNA
taggcggctccacaggc

SEQ ID NO: 178760 - DNA, 17 bp, synthetic construct
  source 1..17: mol_type = other DNA
ttaggcggctccacagg

SEQ ID NO: 178761 - DNA, 17 bp, synthetic construct
  source 1..17: mol_type = other DNA
cttaggcggctccacag

SEQ ID NO: 178762 - DNA, 17 bp, synthetic construct
  source 1..17: mol_type = other DNA
ccttaggcggctccaca

SEQ ID NO: 178763 - DNA, 17 bp, synthetic construct
  source 1..17: mol_type = other DNA
gccttaggcggctccac

SEQ ID NO: 178764 - DNA, 17 bp, synthetic construct
  source 1..17: mol_type = other DNA
ggccttaggcggctcca

SEQ ID NO: 178765 - DNA, 17 bp, synthetic construct
  source 1..17: mol_type = other DNA
cggccttaggcggctcc

SEQ ID NO: 178766 - DNA, 17 bp, synthetic construct
  source 1..17: mol_type = other DNA
tcggccttaggcggctc

SEQ ID NO: 178767 - DNA, 17 bp, synthetic construct
  source 1..17: mol_type = other DNA
ctcggccttaggcggct

SEQ ID NO: 178768 - DNA, 17 bp, synthetic construct
  source 1..17: mol_type = other DNA
gctcggccttaggcggc

SEQ ID NO: 178769 - DNA, 17 bp, synthetic construct
  source 1..17: mol_type = other DNA
cgctcggccttaggcgg

SEQ ID NO: 178770 - DNA, 17 bp, synthetic construct
  source 1..17: mol_type = other DNA
gcgctcggccttaggcg

SEQ ID NO: 178771 - DNA, 17 bp, synthetic construct
  source 1..17: mol_type = other DNA
tgcgctcggccttaggc

SEQ ID NO: 178772 - DNA, 17 bp, synthetic construct
  source 1..17: mol_type = other DNA
gtgcgctcggccttagg

SEQ ID NO: 178773 - DNA, 17 bp, synthetic construct
  source 1..17: mol_type = other DNA
ggtgcgctcggccttag

SEQ ID NO: 178774 - DNA, 17 bp, synthetic construct
  source 1..17: mol_type = other DNA
gggtgcgctcggcctta

SEQ ID NO: 178775 - DNA, 17 bp, synthetic construct
  source 1..17: mol_type = other DNA
agggtgcgctcggcctt

SEQ ID NO: 178776 - DNA, 17 bp, synthetic construct
  source 1..17: mol_type = other DNA
cagggtgcgctcggcct

SEQ ID NO: 178777 - DNA, 17 bp, synthetic construct
  source 1..17: mol_type = other DNA
acagggtgcgctcggcc

SEQ ID NO: 178778 - DNA, 17 bp, synthetic construct
  source 1..17: mol_type = other DNA
cacagggtgcgctcggc

SEQ ID NO: 178779 - DNA, 17 bp, synthetic construct
  source 1..17: mol_type = other DNA
ccacagggtgcgctcgg

SEQ ID NO: 178780 - DNA, 17 bp, synthetic construct
  source 1..17: mol_type = other DNA
gccacagggtgcgctcg

SEQ ID NO: 178781 - DNA, 17 bp, synthetic construct
  source 1..17: mol_type = other DNA
ggccacagggtgcgctc

SEQ ID NO: 178782 - DNA, 17 bp, synthetic construct
  source 1..17: mol_type = other DNA
aggccacagggtgcgct

SEQ ID NO: 178783 - DNA, 17 bp, synthetic construct
  source 1..17: mol_type = other DNA
taggccacagggtgcgc

SEQ ID NO: 178784 - DNA, 17 bp, synthetic construct
  source 1..17: mol_type = other DNA
ttaggccacagggtgcg

SEQ ID NO: 178785 - DNA, 17 bp, synthetic construct
  source 1..17: mol_type = other DNA
tttaggccacagggtgc

SEQ ID NO: 178786 - DNA, 17 bp, synthetic construct
  source 1..17: mol_type = other DNA
atttaggccacagggtg

SEQ ID NO: 178787 - DNA, 17 bp, synthetic construct
  source 1..17: mol_type = other DNA
catttaggccacagggt

SEQ ID NO: 178788 - DNA, 17 bp, synthetic construct
  source 1..17: mol_type = other DNA
gcatttaggccacaggg

SEQ ID NO: 178789 - DNA, 17 bp, synthetic construct
  source 1..17: mol_type = other DNA
tgcatttaggccacagg

SEQ ID NO: 178790 - DNA, 17 bp, synthetic construct
  source 1..17: mol_type = other DNA
ctgcatttaggccacag

SEQ ID NO: 178791 - DNA, 17 bp, synthetic construct
  source 1..17: mol_type = other DNA
gctgcatttaggccaca

SEQ ID NO: 178792 - DNA, 17 bp, synthetic construct
  source 1..17: mol_type = other DNA
ggctgcatttaggccac

SEQ ID NO: 178793 - DNA, 17 bp, synthetic construct
  source 1..17: mol_type = other DNA
tggctgcatttaggcca

SEQ ID NO: 178794 - DNA, 17 bp, synthetic construct
  source 1..17: mol_type = other DNA
ctggctgcatttaggcc

SEQ ID NO: 178795 - DNA, 17 bp, synthetic construct
  source 1..17: mol_type = other DNA
gctggctgcatttaggc

SEQ ID NO: 178796 - DNA, 17 bp, synthetic construct
  source 1..17: mol_type = other DNA
agctggctgcatttagg

SEQ ID NO: 178797 - DNA, 17 bp, synthetic construct
  source 1..17: mol_type = other DNA
cagctggctgcatttag

SEQ ID NO: 178798 - DNA, 17 bp, synthetic construct
  source 1..17: mol_type = other DNA
ccagctggctgcattta

SEQ ID NO: 178799 - DNA, 17 bp, synthetic construct
  source 1..17: mol_type = other DNA
tccagctggctgcattt

SEQ ID NO: 178800 - DNA, 17 bp, synthetic construct
  source 1..17: mol_type = other DNA
ctccagctggctgcatt

SEQ ID NO: 178801 - DNA, 17 bp, synthetic construct
  source 1..17: mol_type = other DNA
tctccagctggctgcat

SEQ ID NO: 178802 - DNA, 17 bp, synthetic construct
  source 1..17: mol_type = other DNA
gtctccagctggctgca

SEQ ID NO: 178803 - DNA, 17 bp, synthetic construct
  source 1..17: mol_type = other DNA
agtctccagctggctgc

SEQ ID NO: 178804 - DNA, 17 bp, synthetic construct
  source 1..17: mol_type = other DNA
gagtctccagctggctg

SEQ ID NO: 178805 - DNA, 17 bp, synthetic construct
  source 1..17: mol_type = other DNA
ggagtctccagctggct

SEQ ID NO: 178806 - DNA, 17 bp, synthetic construct
  source 1..17: mol_type = other DNA
tggagtctccagctggc

SEQ ID NO: 178807 - DNA, 17 bp, synthetic construct
  source 1..17: mol_type = other DNA
ctggagtctccagctgg

SEQ ID NO: 178808 - DNA, 17 bp, synthetic construct
  source 1..17: mol_type = other DNA
cctggagtctccagctg

SEQ ID NO: 178809 - DNA, 17 bp, synthetic construct
  source 1..17: mol_type = other DNA
gcctggagtctccagct

SEQ ID NO: 178810 - DNA, 17 bp, synthetic construct
  source 1..17: mol_type = other DNA
ggcctggagtctccagc

SEQ ID NO: 178811 - DNA, 17 bp, synthetic construct
  source 1..17: mol_type = other DNA
gggcctggagtctccag

SEQ ID NO: 178812 - DNA, 17 bp, synthetic construct
  source 1..17: mol_type = other DNA
ggggcctggagtctcca

SEQ ID NO: 178813 - DNA, 17 bp, synthetic construct
  source 1..17: mol_type = other DNA
gggggcctggagtctcc

SEQ ID NO: 178814 - DNA, 17 bp, synthetic construct
  source 1..17: mol_type = other DNA
tgggggcctggagtctc

SEQ ID NO: 178815 - DNA, 17 bp, synthetic construct
  source 1..17: mol_type = other DNA
ctgggggcctggagtct

SEQ ID NO: 178816 - DNA, 17 bp, synthetic construct
  source 1..17: mol_type = other DNA
cctgggggcctggagtc

SEQ ID NO: 178817 - DNA, 17 bp, synthetic construct
  source 1..17: mol_type = other DNA
ccctgggggcctggagt

SEQ ID NO: 178818 - DNA, 17 bp, synthetic construct
  source 1..17: mol_type = other DNA
tccctgggggcctggag

SEQ ID NO: 178819 - DNA, 17 bp, synthetic construct
  source 1..17: mol_type = other DNA
ttccctgggggcctgga

SEQ ID NO: 178820 - DNA, 17 bp, synthetic construct
  source 1..17: mol_type = other DNA
cttccctgggggcctgg

SEQ ID NO: 178821 - DNA, 17 bp, synthetic construct
  source 1..17: mol_type = other DNA
tcttccctgggggcctg

SEQ ID NO: 178822 - DNA, 17 bp, synthetic construct
  source 1..17: mol_type = other DNA
atcttccctgggggcct

SEQ ID NO: 178823 - DNA, 17 bp, synthetic construct
  source 1..17: mol_type = other DNA
gatcttccctgggggcc

SEQ ID NO: 178824 - DNA, 17 bp, synthetic construct
  source 1..17: mol_type = other DNA
agatcttccctgggggc

SEQ ID NO: 178825 - DNA, 17 bp, synthetic construct
  source 1..17: mol_type = other DNA
cagatcttccctggggg

SEQ ID NO: 178826 - DNA, 17 bp, synthetic construct
  source 1..17: mol_type = other DNA
ccagatcttccctgggg

SEQ ID NO: 178827 - DNA, 17 bp, synthetic construct
  source 1..17: mol_type = other DNA
cccagatcttccctggg

SEQ ID NO: 178828 - DNA, 17 bp, synthetic construct
  source 1..17: mol_type = other DNA
gcccagatcttccctgg

SEQ ID NO: 178829 - DNA, 17 bp, synthetic construct
  source 1..17: mol_type = other DNA
agcccagatcttccctg

SEQ ID NO: 178830 - DNA, 17 bp, synthetic construct
  source 1..17: mol_type = other DNA
aagcccagatcttccct

SEQ ID NO: 178831 - DNA, 17 bp, synthetic construct
  source 1..17: mol_type = other DNA
aaagcccagatcttccc

SEQ ID NO: 178832 - DNA, 17 bp, synthetic construct
  source 1..17: mol_type = other DNA
caaagcccagatcttcc

SEQ ID NO: 178833 - DNA, 17 bp, synthetic construct
  source 1..17: mol_type = other DNA
ccaaagcccagatcttc

SEQ ID NO: 178834 - DNA, 17 bp, synthetic construct
  source 1..17: mol_type = other DNA
cccaaagcccagatctt

SEQ ID NO: 178835 - DNA, 17 bp, synthetic construct
  source 1..17: mol_type = other DNA
ccccaaagcccagatct

SEQ ID NO: 178836 - DNA, 17 bp, synthetic construct
  source 1..17: mol_type = other DNA
accccaaagcccagatc

SEQ ID NO: 178837 - DNA, 17 bp, synthetic construct
  source 1..17: mol_type = other DNA
caccccaaagcccagat

SEQ ID NO: 178838 - DNA, 17 bp, synthetic construct
  source 1..17: mol_type = other DNA
ccaccccaaagcccaga

SEQ ID NO: 178839 - DNA, 17 bp, synthetic construct
  source 1..17: mol_type = other DNA
cccaccccaaagcccag

SEQ ID NO: 178840 - DNA, 17 bp, synthetic construct
  source 1..17: mol_type = other DNA
ccccaccccaaagccca

SEQ ID NO: 178841 - DNA, 17 bp, synthetic construct
  source 1..17: mol_type = other DNA
cccccaccccaaagccc

SEQ ID NO: 178842 - DNA, 17 bp, synthetic construct
  source 1..17: mol_type = other DNA
tcccccaccccaaagcc

SEQ ID NO: 178843 - DNA, 17 bp, synthetic construct
  source 1..17: mol_type = other DNA
atcccccaccccaaagc

SEQ ID NO: 178844 - DNA, 17 bp, synthetic construct
  source 1..17: mol_type = other DNA
tatcccccaccccaaag

SEQ ID NO: 178845 - DNA, 17 bp, synthetic construct
  source 1..17: mol_type = other DNA
gtatcccccaccccaaa

SEQ ID NO: 178846 - DNA, 17 bp, synthetic construct
  source 1..17: mol_type = other DNA
tgtatcccccaccccaa

SEQ ID NO: 178847 - DNA, 17 bp, synthetic construct
  source 1..17: mol_type = other DNA
gtgtatcccccacccca

SEQ ID NO: 178848 - DNA, 17 bp, synthetic construct
  source 1..17: mol_type = other DNA
tgtgtatcccccacccc

SEQ ID NO: 178849 - DNA, 17 bp, synthetic construct
  source 1..17: mol_type = other DNA
ctgtgtatcccccaccc

SEQ ID NO: 178850 - DNA, 17 bp, synthetic construct
  source 1..17: mol_type = other DNA
cctgtgtatcccccacc

SEQ ID NO: 178851 - DNA, 17 bp, synthetic construct
  source 1..17: mol_type = other DNA
ccctgtgtatcccccac

SEQ ID NO: 178852 - DNA, 17 bp, synthetic construct
  source 1..17: mol_type = other DNA
cccctgtgtatccccca

SEQ ID NO: 178853 - DNA, 17 bp, synthetic construct
  source 1..17: mol_type = other DNA
ccccctgtgtatccccc

SEQ ID NO: 178854 - DNA, 17 bp, synthetic construct
  source 1..17: mol_type = other DNA
cccccctgtgtatcccc

SEQ ID NO: 178855 - DNA, 17 bp, synthetic construct
  source 1..17: mol_type = other DNA
acccccctgtgtatccc

SEQ ID NO: 178856 - DNA, 17 bp, synthetic construct
  source 1..17: mol_type = other DNA
gacccccctgtgtatcc

SEQ ID NO: 178857 - DNA, 17 bp, synthetic construct
  source 1..17: mol_type = other DNA
agacccccctgtgtatc

SEQ ID NO: 178858 - DNA, 17 bp, synthetic construct
  source 1..17: mol_type = other DNA
gagacccccctgtgtat

SEQ ID NO: 178859 - DNA, 17 bp, synthetic construct
  source 1..17: mol_type = other DNA
agagacccccctgtgta

SEQ ID NO: 178860 - DNA, 17 bp, synthetic construct
  source 1..17: mol_type = other DNA
cagagacccccctgtgt

SEQ ID NO: 178861 - DNA, 17 bp, synthetic construct
  source 1..17: mol_type = other DNA
gcagagacccccctgtg

SEQ ID NO: 178862 - DNA, 17 bp, synthetic construct
  source 1..17: mol_type = other DNA
tgcagagacccccctgt

SEQ ID NO: 178863 - DNA, 17 bp, synthetic construct
  source 1..17: mol_type = other DNA
gtgcagagacccccctg

SEQ ID NO: 178864 - DNA, 17 bp, synthetic construct
  source 1..17: mol_type = other DNA
tgtgcagagacccccct

SEQ ID NO: 178865 - DNA, 17 bp, synthetic construct
  source 1..17: mol_type = other DNA
atgtgcagagacccccc

SEQ ID NO: 178866 - DNA, 17 bp, synthetic construct
  source 1..17: mol_type = other DNA
catgtgcagagaccccc

SEQ ID NO: 178867 - DNA, 17 bp, synthetic construct
  source 1..17: mol_type = other DNA
ccatgtgcagagacccc

SEQ ID NO: 178868 - DNA, 17 bp, synthetic construct
  source 1..17: mol_type = other DNA
tccatgtgcagagaccc

SEQ ID NO: 178869 - DNA, 17 bp, synthetic construct
  source 1..17: mol_type = other DNA
ctccatgtgcagagacc

SEQ ID NO: 178870 - DNA, 17 bp, synthetic construct
  source 1..17: mol_type = other DNA
cctccatgtgcagagac

SEQ ID NO: 178871 - DNA, 17 bp, synthetic construct
  source 1..17: mol_type = other DNA
gcctccatgtgcagaga

SEQ ID NO: 178872 - DNA, 17 bp, synthetic construct
  source 1..17: mol_type = other DNA
tgcctccatgtgcagag

SEQ ID NO: 178873 - DNA, 17 bp, synthetic construct
  source 1..17: mol_type = other DNA
ctgcctccatgtgcaga

SEQ ID NO: 178874 - DNA, 17 bp, synthetic construct
  source 1..17: mol_type = other DNA
tctgcctccatgtgcag

SEQ ID NO: 178875 - DNA, 17 bp, synthetic construct
  source 1..17: mol_type = other DNA
ctctgcctccatgtgca

SEQ ID NO: 178876 - DNA, 17 bp, synthetic construct
  source 1..17: mol_type = other DNA
gctctgcctccatgtgc

SEQ ID NO: 178877 - DNA, 17 bp, synthetic construct
  source 1..17: mol_type = other DNA
ggctctgcctccatgtg

SEQ ID NO: 178878 - DNA, 17 bp, synthetic construct
  source 1..17: mol_type = other DNA
gggctctgcctccatgt

SEQ ID NO: 178879 - DNA, 17 bp, synthetic construct
  source 1..17: mol_type = other DNA
ggggctctgcctccatg

SEQ ID NO: 178880 - DNA, 17 bp, synthetic construct
  source 1..17: mol_type = other DNA
tggggctctgcctccat

SEQ ID NO: 178881 - DNA, 17 bp, synthetic construct
  source 1..17: mol_type = other DNA
ttggggctctgcctcca

SEQ ID NO: 178882 - DNA, 17 bp, synthetic construct
  source 1..17: mol_type = other DNA
tttggggctctgcctcc

SEQ ID NO: 178883 - DNA, 17 bp, synthetic construct
  source 1..17: mol_type = other DNA
ctttggggctctgcctc

SEQ ID NO: 178884 - DNA, 17 bp, synthetic construct
  source 1..17: mol_type = other DNA
tctttggggctctgcct

SEQ ID NO: 178885 - DNA, 17 bp, synthetic construct
  source 1..17: mol_type = other DNA
ctctttggggctctgcc

SEQ ID NO: 178886 - DNA, 17 bp, synthetic construct
  source 1..17: mol_type = other DNA
tctctttggggctctgc

SEQ ID NO: 178887 - DNA, 17 bp, synthetic construct
  source 1..17: mol_type = other DNA
ttctctttggggctctg

SEQ ID NO: 178888 - DNA, 17 bp, synthetic construct
  source 1..17: mol_type = other DNA
cttctctttggggctct

SEQ ID NO: 178889 - DNA, 17 bp, synthetic construct
  source 1..17: mol_type = other DNA
gcttctctttggggctc

SEQ ID NO: 178890 - DNA, 17 bp, synthetic construct
  source 1..17: mol_type = other DNA
ggcttctctttggggct

SEQ ID NO: 178891 - DNA, 17 bp, synthetic construct
  source 1..17: mol_type = other DNA
gggcttctctttggggc

SEQ ID NO: 178892 - DNA, 17 bp, synthetic construct
  source 1..17: mol_type = other DNA
agggcttctctttgggg

SEQ ID NO: 178893 - DNA, 17 bp, synthetic construct
  source 1..17: mol_type = other DNA
cagggcttctctttggg

SEQ ID NO: 178894 - DNA, 17 bp, synthetic construct
  source 1..17: mol_type = other DNA
gcagggcttctctttgg

SEQ ID NO: 178895 - DNA, 17 bp, synthetic construct
  source 1..17: mol_type = other DNA
agcagggcttctctttg

SEQ ID NO: 178896 - DNA, 17 bp, synthetic construct
  source 1..17: mol_type = other DNA
gagcagggcttctcttt

SEQ ID NO: 178897 - DNA, 17 bp, synthetic construct
  source 1..17: mol_type = other DNA
ggagcagggcttctctt

SEQ ID NO: 178898 - DNA, 17 bp, synthetic construct
  source 1..17: mol_type = other DNA
gggagcagggcttctct

SEQ ID NO: 178899 - DNA, 17 bp, synthetic construct
  source 1..17: mol_type = other DNA
ggggagcagggcttctc

SEQ ID NO: 178900 - DNA, 17 bp, synthetic construct
  source 1..17: mol_type = other DNA
cggggagcagggcttct

SEQ ID NO: 178901 - DNA, 17 bp, synthetic construct
  source 1..17: mol_type = other DNA
tcggggagcagggcttc

SEQ ID NO: 178902 - DNA, 17 bp, synthetic construct
  source 1..17: mol_type = other DNA
ctcggggagcagggctt

SEQ ID NO: 178903 - DNA, 17 bp, synthetic construct
  source 1..17: mol_type = other DNA
gctcggggagcagggct

SEQ ID NO: 178904 - DNA, 17 bp, synthetic construct
  source 1..17: mol_type = other DNA
ggctcggggagcagggc

SEQ ID NO: 178905 - DNA, 17 bp, synthetic construct
  source 1..17: mol_type = other DNA
gggctcggggagcaggg

SEQ ID NO: 178906 - DNA, 17 bp, synthetic construct
  source 1..17: mol_type = other DNA
tgggctcggggagcagg

SEQ ID NO: 178907 - DNA, 17 bp, synthetic construct
  source 1..17: mol_type = other DNA
gtgggctcggggagcag

SEQ ID NO: 178908 - DNA, 17 bp, synthetic construct
  source 1..17: mol_type = other DNA
ggtgggctcggggagca

SEQ ID NO: 178909 - DNA, 17 bp, synthetic construct
  source 1..17: mol_type = other DNA
aggtgggctcggggagc

SEQ ID NO: 178910 - DNA, 17 bp, synthetic construct
  source 1..17: mol_type = other DNA
caggtgggctcggggag

SEQ ID NO: 178911 - DNA, 17 bp, synthetic construct
  source 1..17: mol_type = other DNA
ccaggtgggctcgggga

SEQ ID NO: 178912 - DNA, 17 bp, synthetic construct
  source 1..17: mol_type = other DNA
gccaggtgggctcgggg

SEQ ID NO: 178913 - DNA, 17 bp, synthetic construct
  source 1..17: mol_type = other DNA
tgccaggtgggctcggg

SEQ ID NO: 178914 - DNA, 17 bp, synthetic construct
  source 1..17: mol_type = other DNA
gtgccaggtgggctcgg

SEQ ID NO: 178915 - DNA, 17 bp, synthetic construct
  source 1..17: mol_type = other DNA
agtgccaggtgggctcg

SEQ ID NO: 178916 - DNA, 17 bp, synthetic construct
  source 1..17: mol_type = other DNA
cagtgccaggtgggctc

SEQ ID NO: 178917 - DNA, 17 bp, synthetic construct
  source 1..17: mol_type = other DNA
gcagtgccaggtgggct

SEQ ID NO: 178918 - DNA, 17 bp, synthetic construct
  source 1..17: mol_type = other DNA
ggcagtgccaggtgggc

SEQ ID NO: 178919 - DNA, 17 bp, synthetic construct
  source 1..17: mol_type = other DNA
aggcagtgccaggtggg

SEQ ID NO: 178920 - DNA, 17 bp, synthetic construct
  source 1..17: mol_type = other DNA
gaggcagtgccaggtgg

SEQ ID NO: 178921 - DNA, 17 bp, synthetic construct
  source 1..17: mol_type = other DNA
ggaggcagtgccaggtg

SEQ ID NO: 178922 - DNA, 17 bp, synthetic construct
  source 1..17: mol_type = other DNA
gggaggcagtgccaggt

SEQ ID NO: 178923 - DNA, 17 bp, synthetic construct
  source 1..17: mol_type = other DNA
tgggaggcagtgccagg

SEQ ID NO: 178924 - DNA, 17 bp, synthetic construct
  source 1..17: mol_type = other DNA
ctgggaggcagtgccag

SEQ ID NO: 178925 - DNA, 17 bp, synthetic construct
  source 1..17: mol_type = other DNA
gctgggaggcagtgcca

SEQ ID NO: 178926 - DNA, 17 bp, synthetic construct
  source 1..17: mol_type = other DNA
agctgggaggcagtgcc

SEQ ID NO: 178927 - DNA, 17 bp, synthetic construct
  source 1..17: mol_type = other DNA
gagctgggaggcagtgc

SEQ ID NO: 178928 - DNA, 17 bp, synthetic construct
  source 1..17: mol_type = other DNA
tgagctgggaggcagtg

SEQ ID NO: 178929 - DNA, 17 bp, synthetic construct
  source 1..17: mol_type = other DNA
ctgagctgggaggcagt

SEQ ID NO: 178930 - DNA, 17 bp, synthetic construct
  source 1..17: mol_type = other DNA
cctgagctgggaggcag

SEQ ID NO: 178931 - DNA, 17 bp, synthetic construct
  source 1..17: mol_type = other DNA
ccctgagctgggaggca

SEQ ID NO: 178932 - DNA, 17 bp, synthetic construct
  source 1..17: mol_type = other DNA
accctgagctgggaggc

SEQ ID NO: 178933 - DNA, 17 bp, synthetic construct
  source 1..17: mol_type = other DNA
aaccctgagctgggagg

SEQ ID NO: 178934 - DNA, 17 bp, synthetic construct
  source 1..17: mol_type = other DNA
gaaccctgagctgggag

SEQ ID NO: 178935 - DNA, 17 bp, synthetic construct
  source 1..17: mol_type = other DNA
ggaaccctgagctggga

SEQ ID NO: 178936 - DNA, 17 bp, synthetic construct
  source 1..17: mol_type = other DNA
gggaaccctgagctggg

SEQ ID NO: 178937 - DNA, 17 bp, synthetic construct
  source 1..17: mol_type = other DNA
ggggaaccctgagctgg

SEQ ID NO: 178938 - DNA, 17 bp, synthetic construct
  source 1..17: mol_type = other DNA
aggggaaccctgagctg

SEQ ID NO: 178939 - DNA, 17 bp, synthetic construct
  source 1..17: mol_type = other DNA
caggggaaccctgagct

SEQ ID NO: 178940 - DNA, 17 bp, synthetic construct
  source 1..17: mol_type = other DNA
ccaggggaaccctgagc

SEQ ID NO: 178941 - DNA, 17 bp, synthetic construct
  source 1..17: mol_type = other DNA
tccaggggaaccctgag

SEQ ID NO: 178942 - DNA, 17 bp, synthetic construct
  source 1..17: mol_type = other DNA
atccaggggaaccctga

SEQ ID NO: 178943 - DNA, 17 bp, synthetic construct
  source 1..17: mol_type = other DNA
aatccaggggaaccctg

SEQ ID NO: 178944 - DNA, 17 bp, synthetic construct
  source 1..17: mol_type = other DNA
gaatccaggggaaccct

SEQ ID NO: 178945 - DNA, 17 bp, synthetic construct
  source 1..17: mol_type = other DNA
ggaatccaggggaaccc

SEQ ID NO: 178946 - DNA, 17 bp, synthetic construct
  source 1..17: mol_type = other DNA
gggaatccaggggaacc

SEQ ID NO: 178947 - DNA, 17 bp, synthetic construct
  source 1..17: mol_type = other DNA
ggggaatccaggggaac

SEQ ID NO: 178948 - DNA, 17 bp, synthetic construct
  source 1..17: mol_type = other DNA
gggggaatccaggggaa

SEQ ID NO: 178949 - DNA, 17 bp, synthetic construct
  source 1..17: mol_type = other DNA
tgggggaatccagggga

SEQ ID NO: 178950 - DNA, 17 bp, synthetic construct
  source 1..17: mol_type = other DNA
ctgggggaatccagggg

SEQ ID NO: 178951 - DNA, 17 bp, synthetic construct
  source 1..17: mol_type = other DNA
tctgggggaatccaggg

SEQ ID NO: 178952 - DNA, 17 bp, synthetic construct
  source 1..17: mol_type = other DNA
atctgggggaatccagg

SEQ ID NO: 178953 - DNA, 17 bp, synthetic construct
  source 1..17: mol_type = other DNA
gatctgggggaatccag

SEQ ID NO: 178954 - DNA, 17 bp, synthetic construct
  source 1..17: mol_type = other DNA
ggatctgggggaatcca

SEQ ID NO: 178955 - DNA, 17 bp, synthetic construct
  source 1..17: mol_type = other DNA
aggatctgggggaatcc

SEQ ID NO: 178956 - DNA, 17 bp, synthetic construct
  source 1..17: mol_type = other DNA
caggatctgggggaatc

SEQ ID NO: 178957 - DNA, 17 bp, synthetic construct
  source 1..17: mol_type = other DNA
acaggatctgggggaat

SEQ ID NO: 178958 - DNA, 17 bp, synthetic construct
  source 1..17: mol_type = other DNA
aacaggatctgggggaa

SEQ ID NO: 178959 - DNA, 17 bp, synthetic construct
  source 1..17: mol_type = other DNA
aaacaggatctggggga

SEQ ID NO: 178960 - DNA, 17 bp, synthetic construct
  source 1..17: mol_type = other DNA
caaacaggatctggggg

SEQ ID NO: 178961 - DNA, 17 bp, synthetic construct
  source 1..17: mol_type = other DNA
tcaaacaggatctgggg

SEQ ID NO: 178962 - DNA, 17 bp, synthetic construct
  source 1..17: mol_type = other DNA
gtcaaacaggatctggg

SEQ ID NO: 178963 - DNA, 17 bp, synthetic construct
  source 1..17: mol_type = other DNA
ggtcaaacaggatctgg

SEQ ID NO: 178964 - DNA, 17 bp, synthetic construct
  source 1..17: mol_type = other DNA
tggtcaaacaggatctg

SEQ ID NO: 178965 - DNA, 17 bp, synthetic construct
  source 1..17: mol_type = other DNA
ttggtcaaacaggatct

SEQ ID NO: 178966 - DNA, 17 bp, synthetic construct
  source 1..17: mol_type = other DNA
tttggtcaaacaggatc

SEQ ID NO: 178967 - DNA, 17 bp, synthetic construct
  source 1..17: mol_type = other DNA
atttggtcaaacaggat

SEQ ID NO: 178968 - DNA, 17 bp, synthetic construct
  source 1..17: mol_type = other DNA
aatttggtcaaacagga

SEQ ID NO: 178969 - DNA, 17 bp, synthetic construct
  source 1..17: mol_type = other DNA
gaatttggtcaaacagg

SEQ ID NO: 178970 - DNA, 17 bp, synthetic construct
  source 1..17: mol_type = other DNA
ggaatttggtcaaacag

SEQ ID NO: 178971 - DNA, 17 bp, synthetic construct
  source 1..17: mol_type = other DNA
cggaatttggtcaaaca

SEQ ID NO: 178972 - DNA, 17 bp, synthetic construct
  source 1..17: mol_type = other DNA
ccggaatttggtcaaac

SEQ ID NO: 178973 - DNA, 17 bp, synthetic construct
  source 1..17: mol_type = other DNA
accggaatttggtcaaa

SEQ ID NO: 178974 - DNA, 17 bp, synthetic construct
  source 1..17: mol_type = other DNA
caccggaatttggtcaa

SEQ ID NO: 178975 - DNA, 17 bp, synthetic construct
  source 1..17: mol_type = other DNA
tcaccggaatttggtca

SEQ ID NO: 178976 - DNA, 17 bp, synthetic construct
  source 1..17: mol_type = other DNA
ctcaccggaatttggtc

SEQ ID NO: 178977 - DNA, 17 bp, synthetic construct
  source 1..17: mol_type = other DNA
gctcaccggaatttggt

SEQ ID NO: 178978 - DNA, 17 bp, synthetic construct
  source 1..17: mol_type = other DNA
tgctcaccggaatttgg

SEQ ID NO: 178979 - DNA, 17 bp, synthetic construct
  source 1..17: mol_type = other DNA
ctgctcaccggaatttg

SEQ ID NO: 178980 - DNA, 17 bp, synthetic construct
  source 1..17: mol_type = other DNA
gctgctcaccggaattt

SEQ ID NO: 178981 - DNA, 17 bp, synthetic construct
  source 1..17: mol_type = other DNA
cgctgctcaccggaatt

SEQ ID NO: 178982 - DNA, 17 bp, synthetic construct
  source 1..17: mol_type = other DNA
ccgctgctcaccggaat

SEQ ID NO: 178983 - DNA, 17 bp, synthetic construct
  source 1..17: mol_type = other DNA
accgctgctcaccggaa

SEQ ID NO: 178984 - DNA, 17 bp, synthetic construct
  source 1..17: mol_type = other DNA
aaccgctgctcaccgga

SEQ ID NO: 178985 - DNA, 17 bp, synthetic construct
  source 1..17: mol_type = other DNA
aaaccgctgctcaccgg

SEQ ID NO: 178986 - DNA, 17 bp, synthetic construct
  source 1..17: mol_type = other DNA
gaaaccgctgctcaccg

SEQ ID NO: 178987 - DNA, 17 bp, synthetic construct
  source 1..17: mol_type = other DNA
tgaaaccgctgctcacc

SEQ ID NO: 178988 - DNA, 17 bp, synthetic construct
  source 1..17: mol_type = other DNA
ctgaaaccgctgctcac

SEQ ID NO: 178989 - DNA, 17 bp, synthetic construct
  source 1..17: mol_type = other DNA
gctgaaaccgctgctca

SEQ ID NO: 178990 - DNA, 17 bp, synthetic construct
  source 1..17: mol_type = other DNA
tgctgaaaccgctgctc

SEQ ID NO: 178991 - DNA, 17 bp, synthetic construct
  source 1..17: mol_type = other DNA
ttgctgaaaccgctgct

SEQ ID NO: 178992 - DNA, 17 bp, synthetic construct
  source 1..17: mol_type = other DNA
cttgctgaaaccgctgc

SEQ ID NO: 178993 - DNA, 17 bp, synthetic construct
  source 1..17: mol_type = other DNA
tcttgctgaaaccgctg

SEQ ID NO: 178994 - DNA, 17 bp, synthetic construct
  source 1..17: mol_type = other DNA
ttcttgctgaaaccgct

SEQ ID NO: 178995 - DNA, 17 bp, synthetic construct
  source 1..17: mol_type = other DNA
gttcttgctgaaaccgc

SEQ ID NO: 178996 - DNA, 17 bp, synthetic construct
  source 1..17: mol_type = other DNA
cgttcttgctgaaaccg

SEQ ID NO: 178997 - DNA, 17 bp, synthetic construct
  source 1..17: mol_type = other DNA
ccgttcttgctgaaacc

SEQ ID NO: 178998 - DNA, 17 bp, synthetic construct
  source 1..17: mol_type = other DNA
gccgttcttgctgaaac

SEQ ID NO: 178999 - DNA, 17 bp, synthetic construct
  source 1..17: mol_type = other DNA
cgccgttcttgctgaaa

SEQ ID NO: 179000 - DNA, 17 bp, synthetic construct
  source 1..17: mol_type = other DNA
acgccgttcttgctgaa

SEQ ID NO: 179001 - DNA, 17 bp, synthetic construct
  source 1..17: mol_type = other DNA
cacgccgttcttgctga

SEQ ID NO: 179002 - DNA, 17 bp, synthetic construct
  source 1..17: mol_type = other DNA
gcacgccgttcttgctg

SEQ ID NO: 179003 - DNA, 17 bp, synthetic construct
  source 1..17: mol_type = other DNA
agcacgccgttcttgct

SEQ ID NO: 179004 - DNA, 17 bp, synthetic construct
  source 1..17: mol_type = other DNA
aagcacgccgttcttgc

SEQ ID NO: 179005 - DNA, 17 bp, synthetic construct
  source 1..17: mol_type = other DNA
caagcacgccgttcttg

SEQ ID NO: 179006 - DNA, 17 bp, synthetic construct
  source 1..17: mol_type = other DNA
acaagcacgccgttctt

SEQ ID NO: 179007 - DNA, 17 bp, synthetic construct
  source 1..17: mol_type = other DNA
cacaagcacgccgttct

SEQ ID NO: 179008 - DNA, 17 bp, synthetic construct
  source 1..17: mol_type = other DNA
acacaagcacgccgttc

SEQ ID NO: 179009 - DNA, 17 bp, synthetic construct
  source 1..17: mol_type = other DNA
gacacaagcacgccgtt

SEQ ID NO: 179010 - DNA, 17 bp, synthetic construct
  source 1..17: mol_type = other DNA
agacacaagcacgccgt

SEQ ID NO: 179011 - DNA, 17 bp, synthetic construct
  source 1..17: mol_type = other DNA
cagacacaagcacgccg

SEQ ID NO: 179012 - DNA, 17 bp, synthetic construct
  source 1..17: mol_type = other DNA
acagacacaagcacgcc

SEQ ID NO: 179013 - DNA, 17 bp, synthetic construct
  source 1..17: mol_type = other DNA
cacagacacaagcacgc

SEQ ID NO: 179014 - DNA, 17 bp, synthetic construct
  source 1..17: mol_type = other DNA
gcacagacacaagcacg

SEQ ID NO: 179015 - DNA, 17 bp, synthetic construct
  source 1..17: mol_type = other DNA
agcacagacacaagcac

SEQ ID NO: 179016 - DNA, 17 bp, synthetic construct
  source 1..17: mol_type = other DNA
cagcacagacacaagca

SEQ ID NO: 179017 - DNA, 17 bp, synthetic construct
  source 1..17: mol_type = other DNA
ccagcacagacacaagc

SEQ ID NO: 179018 - DNA, 17 bp, synthetic construct
  source 1..17: mol_type = other DNA
cccagcacagacacaag

SEQ ID NO: 179019 - DNA, 17 bp, synthetic construct
  source 1..17: mol_type = other DNA
ccccagcacagacacaa

SEQ ID NO: 179020 - DNA, 17 bp, synthetic construct
  source 1..17: mol_type = other DNA
tccccagcacagacaca

SEQ ID NO: 179021 - DNA, 17 bp, synthetic construct
  source 1..17: mol_type = other DNA
gtccccagcacagacac

SEQ ID NO: 179022 - DNA, 17 bp, synthetic construct
  source 1..17: mol_type = other DNA
ggtccccagcacagaca

SEQ ID NO: 179023 - DNA, 17 bp, synthetic construct
  source 1..17: mol_type = other DNA
tggtccccagcacagac

SEQ ID NO: 179024 - DNA, 17 bp, synthetic construct
  source 1..17: mol_type = other DNA
gtggtccccagcacaga

SEQ ID NO: 179025 - DNA, 17 bp, synthetic construct
  source 1..17: mol_type = other DNA
ggtggtccccagcacag

SEQ ID NO: 179026 - DNA, 17 bp, synthetic construct
  source 1..17: mol_type = other DNA
tggtggtccccagcaca

SEQ ID NO: 179027 - DNA, 17 bp, synthetic construct
  source 1..17: mol_type = other DNA
gtggtggtccccagcac

SEQ ID NO: 179028 - DNA, 17 bp, synthetic construct
  source 1..17: mol_type = other DNA
ggtggtggtccccagca

SEQ ID NO: 179029 - DNA, 17 bp, synthetic construct
  source 1..17: mol_type = other DNA
tggtggtggtccccagc

SEQ ID NO: 179030 - DNA, 17 bp, synthetic construct
  source 1..17: mol_type = other DNA
atggtggtggtccccag

SEQ ID NO: 179031 - DNA, 17 bp, synthetic construct
  source 1..17: mol_type = other DNA
catggtggtggtcccca

SEQ ID NO: 179032 - DNA, 17 bp, synthetic construct
  source 1..17: mol_type = other DNA
gcatggtggtggtcccc

SEQ ID NO: 179033 - DNA, 17 bp, synthetic construct
  source 1..17: mol_type = other DNA
cgcatggtggtggtccc

SEQ ID NO: 179034 - DNA, 17 bp, synthetic construct
  source 1..17: mol_type = other DNA
acgcatggtggtggtcc

SEQ ID NO: 179035 - DNA, 17 bp, synthetic construct
  source 1..17: mol_type = other DNA
cacgcatggtggtggtc

SEQ ID NO: 179036 - DNA, 17 bp, synthetic construct
  source 1..17: mol_type = other DNA
acacgcatggtggtggt

SEQ ID NO: 179037 - DNA, 17 bp, synthetic construct
  source 1..17: mol_type = other DNA
cacacgcatggtggtgg

SEQ ID NO: 179038 - DNA, 17 bp, synthetic construct
  source 1..17: mol_type = other DNA
ccacacgcatggtggtg

SEQ ID NO: 179039 - DNA, 17 bp, synthetic construct
  source 1..17: mol_type = other DNA
tccacacgcatggtggt

SEQ ID NO: 179040 - DNA, 17 bp, synthetic construct
  source 1..17: mol_type = other DNA
gtccacacgcatggtgg

SEQ ID NO: 179041 - DNA, 17 bp, synthetic construct
  source 1..17: mol_type = other DNA
tgtccacacgcatggtg

SEQ ID NO: 179042 - DNA, 17 bp, synthetic construct
  source 1..17: mol_type = other DNA
atgtccacacgcatggt

SEQ ID NO: 179043 - DNA, 17 bp, synthetic construct
  source 1..17: mol_type = other DNA
aatgtccacacgcatgg

SEQ ID NO: 179044 - DNA, 17 bp, synthetic construct
  source 1..17: mol_type = other DNA
gaatgtccacacgcatg

SEQ ID NO: 179045 - DNA, 17 bp, synthetic construct
  source 1..17: mol_type = other DNA
ggaatgtccacacgcat

SEQ ID NO: 179046 - DNA, 17 bp, synthetic construct
  source 1..17: mol_type = other DNA
aggaatgtccacacgca

SEQ ID NO: 179047 - DNA, 17 bp, synthetic construct
  source 1..17: mol_type = other DNA
caggaatgtccacacgc

SEQ ID NO: 179048 - DNA, 17 bp, synthetic construct
  source 1..17: mol_type = other DNA
gcaggaatgtccacacg

SEQ ID NO: 179049 - DNA, 17 bp, synthetic construct
  source 1..17: mol_type = other DNA
ggcaggaatgtccacac

SEQ ID NO: 179050 - DNA, 17 bp, synthetic construct
  source 1..17: mol_type = other DNA
gggcaggaatgtccaca

SEQ ID NO: 179051 - DNA, 17 bp, synthetic construct
  source 1..17: mol_type = other DNA
agggcaggaatgtccac

SEQ ID NO: 179052 - DNA, 17 bp, synthetic construct
  source 1..17: mol_type = other DNA
cagggcaggaatgtcca

SEQ ID NO: 179053 - DNA, 17 bp, synthetic construct
  source 1..17: mol_type = other DNA
ccagggcaggaatgtcc

SEQ ID NO: 179054 - DNA, 17 bp, synthetic construct
  source 1..17: mol_type = other DNA
cccagggcaggaatgtc

SEQ ID NO: 179055 - DNA, 17 bp, synthetic construct
  source 1..17: mol_type = other DNA
gcccagggcaggaatgt

SEQ ID NO: 179056 - DNA, 17 bp, synthetic construct
  source 1..17: mol_type = other DNA
cgcccagggcaggaatg

SEQ ID NO: 179057 - DNA, 17 bp, synthetic construct
  source 1..17: mol_type = other DNA
acgcccagggcaggaat

SEQ ID NO: 179058 - DNA, 17 bp, synthetic construct
  source 1..17: mol_type = other DNA
cacgcccagggcaggaa

SEQ ID NO: 179059 - DNA, 17 bp, synthetic construct
  source 1..17: mol_type = other DNA
tcacgcccagggcagga

SEQ ID NO: 179060 - DNA, 17 bp, synthetic construct
  source 1..17: mol_type = other DNA
ctcacgcccagggcagg

SEQ ID NO: 179061 - DNA, 17 bp, synthetic construct
  source 1..17: mol_type = other DNA
gctcacgcccagggcag

SEQ ID NO: 179062 - DNA, 17 bp, synthetic construct
  source 1..17: mol_type = other DNA
cgctcacgcccagggca

SEQ ID NO: 179063 - DNA, 17 bp, synthetic construct
  source 1..17: mol_type = other DNA
acgctcacgcccagggc

SEQ ID NO: 179064 - DNA, 17 bp, synthetic construct
  source 1..17: mol_type = other DNA
gacgctcacgcccaggg

SEQ ID NO: 179065 - DNA, 17 bp, synthetic construct
  source 1..17: mol_type = other DNA
tgacgctcacgcccagg

SEQ ID NO: 179066 - DNA, 17 bp, synthetic construct
  source 1..17: mol_type = other DNA
gtgacgctcacgcccag

SEQ ID NO: 179067 - DNA, 17 bp, synthetic construct
  source 1..17: mol_type = other DNA
ggtgacgctcacgccca

SEQ ID NO: 179068 - DNA, 17 bp, synthetic construct
  source 1..17: mol_type = other DNA
aggtgacgctcacgccc

SEQ ID NO: 179069 - DNA, 17 bp, synthetic construct
  source 1..17: mol_type = other DNA
aaggtgacgctcacgcc

SEQ ID NO: 179070 - DNA, 17 bp, synthetic construct
  source 1..17: mol_type = other DNA
gaaggtgacgctcacgc

SEQ ID NO: 179071 - DNA, 17 bp, synthetic construct
  source 1..17: mol_type = other DNA
tgaaggtgacgctcacg

SEQ ID NO: 179072 - DNA, 17 bp, synthetic construct
  source 1..17: mol_type = other DNA
ttgaaggtgacgctcac

SEQ ID NO: 179073 - DNA, 17 bp, synthetic construct
  source 1..17: mol_type = other DNA
attgaaggtgacgctca

SEQ ID NO: 179074 - DNA, 17 bp, synthetic construct
  source 1..17: mol_type = other DNA
cattgaaggtgacgctc

SEQ ID NO: 179075 - DNA, 17 bp, synthetic construct
  source 1..17: mol_type = other DNA
ccattgaaggtgacgct

SEQ ID NO: 179076 - DNA, 17 bp, synthetic construct
  source 1..17: mol_type = other DNA
gccattgaaggtgacgc

SEQ ID NO: 179077 - DNA, 17 bp, synthetic construct
  source 1..17: mol_type = other DNA
ggccattgaaggtgacg

SEQ ID NO: 179078 - DNA, 17 bp, synthetic construct
  source 1..17: mol_type = other DNA
tggccattgaaggtgac

SEQ ID NO: 179079 - DNA, 17 bp, synthetic construct
  source 1..17: mol_type = other DNA
ttggccattgaaggtga

SEQ ID NO: 179080 - DNA, 17 bp, synthetic construct
  source 1..17: mol_type = other DNA
cttggccattgaaggtg

SEQ ID NO: 179081 - DNA, 17 bp, synthetic construct
  source 1..17: mol_type = other DNA
acttggccattgaaggt

SEQ ID NO: 179082 - DNA, 17 bp, synthetic construct
  source 1..17: mol_type = other DNA
gacttggccattgaagg

SEQ ID NO: 179083 - DNA, 17 bp, synthetic construct
  source 1..17: mol_type = other DNA
agacttggccattgaag

SEQ ID NO: 179084 - DNA, 17 bp, synthetic construct
  source 1..17: mol_type = other DNA
aagacttggccattgaa

SEQ ID NO: 179085 - DNA, 17 bp, synthetic construct
  source 1..17: mol_type = other DNA
gaagacttggccattga

SEQ ID NO: 179086 - DNA, 17 bp, synthetic construct
  source 1..17: mol_type = other DNA
ggaagacttggccattg

SEQ ID NO: 179087 - DNA, 17 bp, synthetic construct
  source 1..17: mol_type = other DNA
tggaagacttggccatt

SEQ ID NO: 179088 - DNA, 17 bp, synthetic construct
  source 1..17: mol_type = other DNA
ctggaagacttggccat

SEQ ID NO: 179089 - DNA, 17 bp, synthetic construct
  source 1..17: mol_type = other DNA
cctggaagacttggcca

SEQ ID NO: 179090 - DNA, 17 bp, synthetic construct
  source 1..17: mol_type = other DNA
gcctggaagacttggcc

SEQ ID NO: 179091 - DNA, 17 bp, synthetic construct
  source 1..17: mol_type = other DNA
ggcctggaagacttggc

SEQ ID NO: 179092 - DNA, 17 bp, synthetic construct
  source 1..17: mol_type = other DNA
gggcctggaagacttgg

SEQ ID NO: 179093 - DNA, 17 bp, synthetic construct
  source 1..17: mol_type = other DNA
cgggcctggaagacttg

SEQ ID NO: 179094 - DNA, 17 bp, synthetic construct
  source 1..17: mol_type = other DNA
ccgggcctggaagactt

SEQ ID NO: 179095 - DNA, 17 bp, synthetic construct
  source 1..17: mol_type = other DNA
gccgggcctggaagact

SEQ ID NO: 179096 - DNA, 17 bp, synthetic construct
  source 1..17: mol_type = other DNA
agccgggcctggaagac

SEQ ID NO: 179097 - DNA, 17 bp, synthetic construct
  source 1..17: mol_type = other DNA
cagccgggcctggaaga

SEQ ID NO: 179098 - DNA, 17 bp, synthetic construct
  source 1..17: mol_type = other DNA
gcagccgggcctggaag

SEQ ID NO: 179099 - DNA, 17 bp, synthetic construct
  source 1..17: mol_type = other DNA
ggcagccgggcctggaa

SEQ ID NO: 179100 - DNA, 17 bp, synthetic construct
  source 1..17: mol_type = other DNA
gggcagccgggcctgga

SEQ ID NO: 179101 - DNA, 17 bp, synthetic construct
  source 1..17: mol_type = other DNA
agggcagccgggcctgg

SEQ ID NO: 179102 - DNA, 17 bp, synthetic construct
  source 1..17: mol_type = other DNA
tagggcagccgggcctg

SEQ ID NO: 179103 - DNA, 17 bp, synthetic construct
  source 1..17: mol_type = other DNA
gtagggcagccgggcct

SEQ ID NO: 179104 - DNA, 17 bp, synthetic construct
  source 1..17: mol_type = other DNA
tgtagggcagccgggcc

SEQ ID NO: 179105 - DNA, 17 bp, synthetic construct
  source 1..17: mol_type = other DNA
ctgtagggcagccgggc

SEQ ID NO: 179106 - DNA, 17 bp, synthetic construct
  source 1..17: mol_type = other DNA
gctgtagggcagccggg

SEQ ID NO: 179107 - DNA, 17 bp, synthetic construct
  source 1..17: mol_type = other DNA
ggctgtagggcagccgg

SEQ ID NO: 179108 - DNA, 17 bp, synthetic construct
  source 1..17: mol_type = other DNA
aggctgtagggcagccg

SEQ ID NO: 179109 - DNA, 17 bp, synthetic construct
  source 1..17: mol_type = other DNA
gaggctgtagggcagcc

SEQ ID NO: 179110 - DNA, 17 bp, synthetic construct
  source 1..17: mol_type = other DNA
agaggctgtagggcagc

SEQ ID NO: 179111 - DNA, 17 bp, synthetic construct
  source 1..17: mol_type = other DNA
aagaggctgtagggcag

SEQ ID NO: 179112 - DNA, 17 bp, synthetic construct
  source 1..17: mol_type = other DNA
gaagaggctgtagggca

SEQ ID NO: 179113 - DNA, 17 bp, synthetic construct
  source 1..17: mol_type = other DNA
ggaagaggctgtagggc

SEQ ID NO: 179114 - DNA, 17 bp, synthetic construct
  source 1..17: mol_type = other DNA
tggaagaggctgtaggg

SEQ ID NO: 179115 - DNA, 17 bp, synthetic construct
  source 1..17: mol_type = other DNA
gtggaagaggctgtagg

SEQ ID NO: 179116 - DNA, 17 bp, synthetic construct
  source 1..17: mol_type = other DNA
tgtggaagaggctgtag

SEQ ID NO: 179117 - DNA, 17 bp, synthetic construct
  source 1..17: mol_type = other DNA
ttgtggaagaggctgta

SEQ ID NO: 179118 - DNA, 17 bp, synthetic construct
  source 1..17: mol_type = other DNA
gttgtggaagaggctgt

SEQ ID NO: 179119 - DNA, 17 bp, synthetic construct
  source 1..17: mol_type = other DNA
tgttgtggaagaggctg

SEQ ID NO: 179120 - DNA, 17 bp, synthetic construct
  source 1..17: mol_type = other DNA
ttgttgtggaagaggct

SEQ ID NO: 179121 - DNA, 17 bp, synthetic construct
  source 1..17: mol_type = other DNA
gttgttgtggaagaggc

SEQ ID NO: 179122 - DNA, 17 bp, synthetic construct
  source 1..17: mol_type = other DNA
tgttgttgtggaagagg

SEQ ID NO: 179123 - DNA, 17 bp, synthetic construct
  source 1..17: mol_type = other DNA
gtgttgttgtggaagag

SEQ ID NO: 179124 - DNA, 17 bp, synthetic construct
  source 1..17: mol_type = other DNA
ggtgttgttgtggaaga

SEQ ID NO: 179125 - DNA, 17 bp, synthetic construct
  source 1..17: mol_type = other DNA
cggtgttgttgtggaag

SEQ ID NO: 179126 - DNA, 17 bp, synthetic construct
  source 1..17: mol_type = other DNA
tcggtgttgttgtggaa

SEQ ID NO: 179127 - DNA, 17 bp, synthetic construct
  source 1..17: mol_type = other DNA
ctcggtgttgttgtgga

SEQ ID NO: 179128 - DNA, 17 bp, synthetic construct
  source 1..17: mol_type = other DNA
cctcggtgttgttgtgg

SEQ ID NO: 179129 - DNA, 17 bp, synthetic construct
  source 1..17: mol_type = other DNA
ccctcggtgttgttgtg

SEQ ID NO: 179130 - DNA, 17 bp, synthetic construct
  source 1..17: mol_type = other DNA
gccctcggtgttgttgt

SEQ ID NO: 179131 - DNA, 17 bp, synthetic construct
  source 1..17: mol_type = other DNA
ggccctcggtgttgttg

SEQ ID NO: 179132 - DNA, 17 bp, synthetic construct
  source 1..17: mol_type = other DNA
tggccctcggtgttgtt

SEQ ID NO: 179133 - DNA, 17 bp, synthetic construct
  source 1..17: mol_type = other DNA
ctggccctcggtgttgt

SEQ ID NO: 179134 - DNA, 17 bp, synthetic construct
  source 1..17: mol_type = other DNA
actggccctcggtgttg

SEQ ID NO: 179135 - DNA, 17 bp, synthetic construct
  source 1..17: mol_type = other DNA
cactggccctcggtgtt

SEQ ID NO: 179136 - DNA, 17 bp, synthetic construct
  source 1..17: mol_type = other DNA
gcactggccctcggtgt

SEQ ID NO: 179137 - DNA, 17 bp, synthetic construct
  source 1..17: mol_type = other DNA
cgcactggccctcggtg

SEQ ID NO: 179138 - DNA, 17 bp, synthetic construct
  source 1..17: mol_type = other DNA
ccgcactggccctcggt

SEQ ID NO: 179139 - DNA, 17 bp, synthetic construct
  source 1..17: mol_type = other DNA
accgcactggccctcgg

SEQ ID NO: 179140 - DNA, 17 bp, synthetic construct
  source 1..17: mol_type = other DNA
caccgcactggccctcg

SEQ ID NO: 179141 - DNA, 17 bp, synthetic construct
  source 1..17: mol_type = other DNA
tcaccgcactggccctc

SEQ ID NO: 179142 - DNA, 17 bp, synthetic construct
  source 1..17: mol_type = other DNA
ctcaccgcactggccct

SEQ ID NO: 179143 - DNA, 17 bp, synthetic construct
  source 1..17: mol_type = other DNA
actcaccgcactggccc

SEQ ID NO: 179144 - DNA, 17 bp, synthetic construct
  source 1..17: mol_type = other DNA
cactcaccgcactggcc

SEQ ID NO: 179145 - DNA, 17 bp, synthetic construct
  source 1..17: mol_type = other DNA
ccactcaccgcactggc

SEQ ID NO: 179146 - DNA, 17 bp, synthetic construct
  source 1..17: mol_type = other DNA
cccactcaccgcactgg

SEQ ID NO: 179147 - DNA, 17 bp, synthetic construct
  source 1..17: mol_type = other DNA
gcccactcaccgcactg

SEQ ID NO: 179148 - DNA, 17 bp, synthetic construct
  source 1..17: mol_type = other DNA
cgcccactcaccgcact

SEQ ID NO: 179149 - DNA, 17 bp, synthetic construct
  source 1..17: mol_type = other DNA
ccgcccactcaccgcac

SEQ ID NO: 179150 - DNA, 17 bp, synthetic construct
  source 1..17: mol_type = other DNA
gccgcccactcaccgca

SEQ ID NO: 179151 - DNA, 17 bp, synthetic construct
  source 1..17: mol_type = other DNA
cgccgcccactcaccgc

SEQ ID NO: 179152 - DNA, 17 bp, synthetic construct
  source 1..17: mol_type = other DNA
ccgccgcccactcaccg

SEQ ID NO: 179153 - DNA, 17 bp, synthetic construct
  source 1..17: mol_type = other DNA
cccgccgcccactcacc

SEQ ID NO: 179154 - DNA, 17 bp, synthetic construct
  source 1..17: mol_type = other DNA
acccgccgcccactcac

SEQ ID NO: 179155 - DNA, 17 bp, synthetic construct
  source 1..17: mol_type = other DNA
gacccgccgcccactca

SEQ ID NO: 179156 - DNA, 17 bp, synthetic construct
  source 1..17: mol_type = other DNA
ggacccgccgcccactc

SEQ ID NO: 179157 - DNA, 17 bp, synthetic construct
  source 1..17: mol_type = other DNA
aggacccgccgcccact

SEQ ID NO: 179158 - DNA, 17 bp, synthetic construct
  source 1..17: mol_type = other DNA
caggacccgccgcccac

SEQ ID NO: 179159 - DNA, 17 bp, synthetic construct
  source 1..17: mol_type = other DNA
gcaggacccgccgccca

SEQ ID NO: 179160 - DNA, 17 bp, synthetic construct
  source 1..17: mol_type = other DNA
ggcaggacccgccgccc

SEQ ID NO: 179161 - DNA, 17 bp, synthetic construct
  source 1..17: mol_type = other DNA
gggcaggacccgccgcc

SEQ ID NO: 179162 - DNA, 17 bp, synthetic construct
  source 1..17: mol_type = other DNA
ggggcaggacccgccgc

SEQ ID NO: 179163 - DNA, 17 bp, synthetic construct
  source 1..17: mol_type = other DNA
cggggcaggacccgccg

SEQ ID NO: 179164 - DNA, 17 bp, synthetic construct
  source 1..17: mol_type = other DNA
ccggggcaggacccgcc

SEQ ID NO: 179165 - DNA, 17 bp, synthetic construct
  source 1..17: mol_type = other DNA
gccggggcaggacccgc

SEQ ID NO: 179166 - DNA, 17 bp, synthetic construct
  source 1..17: mol_type = other DNA
ggccggggcaggacccg

SEQ ID NO: 179167 - DNA, 17 bp, synthetic construct
  source 1..17: mol_type = other DNA
tggccggggcaggaccc

SEQ ID NO: 179168 - DNA, 17 bp, synthetic construct
  source 1..17: mol_type = other DNA
ctggccggggcaggacc

SEQ ID NO: 179169 - DNA, 17 bp, synthetic construct
  source 1..17: mol_type = other DNA
cctggccggggcaggac

SEQ ID NO: 179170 - DNA, 17 bp, synthetic construct
  source 1..17: mol_type = other DNA
ccctggccggggcagga

SEQ ID NO: 179171 - DNA, 17 bp, synthetic construct
  source 1..17: mol_type = other DNA
gccctggccggggcagg

SEQ ID NO: 179172 - DNA, 17 bp, synthetic construct
  source 1..17: mol_type = other DNA
agccctggccggggcag

SEQ ID NO: 179173 - DNA, 17 bp, synthetic construct
  source 1..17: mol_type = other DNA
cagccctggccggggca

SEQ ID NO: 179174 - DNA, 17 bp, synthetic construct
  source 1..17: mol_type = other DNA
gcagccctggccggggc

SEQ ID NO: 179175 - DNA, 17 bp, synthetic construct
  source 1..17: mol_type = other DNA
agcagccctggccgggg

SEQ ID NO: 179176 - DNA, 17 bp, synthetic construct
  source 1..17: mol_type = other DNA
cagcagccctggccggg

SEQ ID NO: 179177 - DNA, 17 bp, synthetic construct
  source 1..17: mol_type = other DNA
gcagcagccctggccgg

SEQ ID NO: 179178 - DNA, 17 bp, synthetic construct
  source 1..17: mol_type = other DNA
agcagcagccctggccg

SEQ ID NO: 179179 - DNA, 17 bp, synthetic construct
  source 1..17: mol_type = other DNA
cagcagcagccctggcc

SEQ ID NO: 179180 - DNA, 17 bp, synthetic construct
  source 1..17: mol_type = other DNA
ccagcagcagccctggc

SEQ ID NO: 179181 - DNA, 17 bp, synthetic construct
  source 1..17: mol_type = other DNA
cccagcagcagccctgg

SEQ ID NO: 179182 - DNA, 17 bp, synthetic construct
  source 1..17: mol_type = other DNA
gcccagcagcagccctg

SEQ ID NO: 179183 - DNA, 17 bp, synthetic construct
  source 1..17: mol_type = other DNA
ggcccagcagcagccct

SEQ ID NO: 179184 - DNA, 17 bp, synthetic construct
  source 1..17: mol_type = other DNA
aggcccagcagcagccc

SEQ ID NO: 179185 - DNA, 17 bp, synthetic construct
  source 1..17: mol_type = other DNA
caggcccagcagcagcc

SEQ ID NO: 179186 - DNA, 17 bp, synthetic construct
  source 1..17: mol_type = other DNA
tcaggcccagcagcagc

SEQ ID NO: 179187 - DNA, 17 bp, synthetic construct
  source 1..17: mol_type = other DNA
gtcaggcccagcagcag

SEQ ID NO: 179188 - DNA, 17 bp, synthetic construct
  source 1..17: mol_type = other DNA
tgtcaggcccagcagca

SEQ ID NO: 179189 - DNA, 17 bp, synthetic construct
  source 1..17: mol_type = other DNA
ttgtcaggcccagcagc

SEQ ID NO: 179190 - DNA, 17 bp, synthetic construct
  source 1..17: mol_type = other DNA
gttgtcaggcccagcag

SEQ ID NO: 179191 - DNA, 17 bp, synthetic construct
  source 1..17: mol_type = other DNA
ggttgtcaggcccagca

SEQ ID NO: 179192 - DNA, 17 bp, synthetic construct
  source 1..17: mol_type = other DNA
gggttgtcaggcccagc

SEQ ID NO: 179193 - DNA, 17 bp, synthetic construct
  source 1..17: mol_type = other DNA
tgggttgtcaggcccag

SEQ ID NO: 179194 - DNA, 17 bp, synthetic construct
  source 1..17: mol_type = other DNA
ctgggttgtcaggccca

SEQ ID NO: 179195 - DNA, 17 bp, synthetic construct
  source 1..17: mol_type = other DNA
actgggttgtcaggccc

SEQ ID NO: 179196 - DNA, 17 bp, synthetic construct
  source 1..17: mol_type = other DNA
cactgggttgtcaggcc

SEQ ID NO: 179197 - DNA, 17 bp, synthetic construct
  source 1..17: mol_type = other DNA
tcactgggttgtcaggc

SEQ ID NO: 179198 - DNA, 17 bp, synthetic construct
  source 1..17: mol_type = other DNA
ctcactgggttgtcagg

SEQ ID NO: 179199 - DNA, 17 bp, synthetic construct
  source 1..17: mol_type = other DNA
gctcactgggttgtcag

SEQ ID NO: 179200 - DNA, 17 bp, synthetic construct
  source 1..17: mol_type = other DNA
tgctcactgggttgtca

SEQ ID NO: 179201 - DNA, 17 bp, synthetic construct
  source 1..17: mol_type = other DNA
atgctcactgggttgtc

SEQ ID NO: 179202 - DNA, 17 bp, synthetic construct
  source 1..17: mol_type = other DNA
tatgctcactgggttgt

SEQ ID NO: 179203 - DNA, 17 bp, synthetic construct
  source 1..17: mol_type = other DNA
ctatgctcactgggttg

SEQ ID NO: 179204 - DNA, 17 bp, synthetic construct
  source 1..17: mol_type = other DNA
cctatgctcactgggtt

SEQ ID NO: 179205 - DNA, 17 bp, synthetic construct
  source 1..17: mol_type = other DNA
ccctatgctcactgggt

SEQ ID NO: 179206 - DNA, 17 bp, synthetic construct
  source 1..17: mol_type = other DNA
cccctatgctcactggg

SEQ ID NO: 179207 - DNA, 17 bp, synthetic construct
  source 1..17: mol_type = other DNA
tcccctatgctcactgg

SEQ ID NO: 179208 - DNA, 17 bp, synthetic construct
  source 1..17: mol_type = other DNA
ttcccctatgctcactg

SEQ ID NO: 179209 - DNA, 17 bp, synthetic construct
  source 1..17: mol_type = other DNA
cttcccctatgctcact

SEQ ID NO: 179210 - DNA, 17 bp, synthetic construct
  source 1..17: mol_type = other DNA
gcttcccctatgctcac

SEQ ID NO: 179211 - DNA, 17 bp, synthetic construct
  source 1..17: mol_type = other DNA
ggcttcccctatgctca

SEQ ID NO: 179212 - DNA, 17 bp, synthetic construct
  source 1..17: mol_type = other DNA
aggcttcccctatgctc

SEQ ID NO: 179213 - DNA, 17 bp, synthetic construct
  source 1..17: mol_type = other DNA
caggcttcccctatgct

SEQ ID NO: 179214 - DNA, 17 bp, synthetic construct
  source 1..17: mol_type = other DNA
ccaggcttcccctatgc

SEQ ID NO: 179215 - DNA, 17 bp, synthetic construct
  source 1..17: mol_type = other DNA
cccaggcttcccctatg

SEQ ID NO: 179216 - DNA, 17 bp, synthetic construct
  source 1..17: mol_type = other DNA
ccccaggcttcccctat

SEQ ID NO: 179217 - DNA, 17 bp, synthetic construct
  source 1..17: mol_type = other DNA
tccccaggcttccccta

SEQ ID NO: 179218 - DNA, 17 bp, synthetic construct
  source 1..17: mol_type = other DNA
ctccccaggcttcccct

SEQ ID NO: 179219 - DNA, 17 bp, synthetic construct
  source 1..17: mol_type = other DNA
cctccccaggcttcccc

SEQ ID NO: 179220 - DNA, 17 bp, synthetic construct
  source 1..17: mol_type = other DNA
ccctccccaggcttccc

SEQ ID NO: 179221 - DNA, 17 bp, synthetic construct
  source 1..17: mol_type = other DNA
cccctccccaggcttcc

SEQ ID NO: 179222 - DNA, 17 bp, synthetic construct
  source 1..17: mol_type = other DNA
tcccctccccaggcttc

SEQ ID NO: 179223 - DNA, 17 bp, synthetic construct
  source 1..17: mol_type = other DNA
ttcccctccccaggctt

SEQ ID NO: 179224 - DNA, 17 bp, synthetic construct
  source 1..17: mol_type = other DNA
attcccctccccaggct

SEQ ID NO: 179225 - DNA, 17 bp, synthetic construct
  source 1..17: mol_type = other DNA
cattcccctccccaggc

SEQ ID NO: 179226 - DNA, 17 bp, synthetic construct
  source 1..17: mol_type = other DNA
tcattcccctccccagg

SEQ ID NO: 179227 - DNA, 17 bp, synthetic construct
  source 1..17: mol_type = other DNA
ctcattcccctccccag

SEQ ID NO: 179228 - DNA, 17 bp, synthetic construct
  source 1..17: mol_type = other DNA
actcattcccctcccca

SEQ ID NO: 179229 - DNA, 17 bp, synthetic construct
  source 1..17: mol_type = other DNA
cactcattcccctcccc

SEQ ID NO: 179230 - DNA, 17 bp, synthetic construct
  source 1..17: mol_type = other DNA
ccactcattcccctccc

SEQ ID NO: 179231 - DNA, 17 bp, synthetic construct
  source 1..17: mol_type = other DNA
cccactcattcccctcc

SEQ ID NO: 179232 - DNA, 17 bp, synthetic construct
  source 1..17: mol_type = other DNA
ccccactcattcccctc

SEQ ID NO: 179233 - DNA, 17 bp, synthetic construct
  source 1..17: mol_type = other DNA
cccccactcattcccct

SEQ ID NO: 179234 - DNA, 17 bp, synthetic construct
  source 1..17: mol_type = other DNA
tcccccactcattcccc

SEQ ID NO: 179235 - DNA, 17 bp, synthetic construct
  source 1..17: mol_type = other DNA
ctcccccactcattccc

SEQ ID NO: 179236 - DNA, 17 bp, synthetic construct
  source 1..17: mol_type = other DNA
cctcccccactcattcc

SEQ ID NO: 179237 - DNA, 17 bp, synthetic construct
  source 1..17: mol_type = other DNA
ccctcccccactcattc

SEQ ID NO: 179238 - DNA, 17 bp, synthetic construct
  source 1..17: mol_type = other DNA
cccctcccccactcatt

SEQ ID NO: 179239 - DNA, 17 bp, synthetic construct
  source 1..17: mol_type = other DNA
ccccctcccccactcat

SEQ ID NO: 179240 - DNA, 17 bp, synthetic construct
  source 1..17: mol_type = other DNA
cccccctcccccactca

SEQ ID NO: 179241 - DNA, 17 bp, synthetic construct
  source 1..17: mol_type = other DNA
acccccctcccccactc

SEQ ID NO: 179242 - DNA, 17 bp, synthetic construct
  source 1..17: mol_type = other DNA
cacccccctcccccact

SEQ ID NO: 179243 - DNA, 17 bp, synthetic construct
  source 1..17: mol_type = other DNA
ccacccccctcccccac

SEQ ID NO: 179244 - DNA, 17 bp, synthetic construct
  source 1..17: mol_type = other DNA
cccacccccctccccca

SEQ ID NO: 179245 - DNA, 17 bp, synthetic construct
  source 1..17: mol_type = other DNA
ccccacccccctccccc

SEQ ID NO: 179246 - DNA, 17 bp, synthetic construct
  source 1..17: mol_type = other DNA
cccccacccccctcccc

SEQ ID NO: 179247 - DNA, 17 bp, synthetic construct
  source 1..17: mol_type = other DNA
gcccccacccccctccc

SEQ ID NO: 179248 - DNA, 17 bp, synthetic construct
  source 1..17: mol_type = other DNA
agcccccacccccctcc

SEQ ID NO: 179249 - DNA, 17 bp, synthetic construct
  source 1..17: mol_type = other DNA
cagcccccacccccctc

SEQ ID NO: 179250 - DNA, 17 bp, synthetic construct
  source 1..17: mol_type = other DNA
acagcccccacccccct

SEQ ID NO: 179251 - DNA, 17 bp, synthetic construct
  source 1..17: mol_type = other DNA
cacagcccccacccccc

SEQ ID NO: 179252 - DNA, 17 bp, synthetic construct
  source 1..17: mol_type = other DNA
tcacagcccccaccccc

SEQ ID NO: 179253 - DNA, 17 bp, synthetic construct
  source 1..17: mol_type = other DNA
ttcacagcccccacccc

SEQ ID NO: 179254 - DNA, 17 bp, synthetic construct
  source 1..17: mol_type = other DNA
tttcacagcccccaccc

SEQ ID NO: 179255 - DNA, 17 bp, synthetic construct
  source 1..17: mol_type = other DNA
ctttcacagcccccacc

SEQ ID NO: 179256 - DNA, 17 bp, synthetic construct
  source 1..17: mol_type = other DNA
cctttcacagcccccac

SEQ ID NO: 179257 - DNA, 17 bp, synthetic construct
  source 1..17: mol_type = other DNA
gcctttcacagccccca

SEQ ID NO: 179258 - DNA, 17 bp, synthetic construct
  source 1..17: mol_type = other DNA
agcctttcacagccccc

SEQ ID NO: 179259 - DNA, 17 bp, synthetic construct
  source 1..17: mol_type = other DNA
gagcctttcacagcccc

SEQ ID NO: 179260 - DNA, 17 bp, synthetic construct
  source 1..17: mol_type = other DNA
ggagcctttcacagccc

SEQ ID NO: 179261 - DNA, 17 bp, synthetic construct
  source 1..17: mol_type = other DNA
gggagcctttcacagcc

SEQ ID NO: 179262 - DNA, 17 bp, synthetic construct
  source 1..17: mol_type = other DNA
ggggagcctttcacagc

SEQ ID NO: 179263 - DNA, 17 bp, synthetic construct
  source 1..17: mol_type = other DNA
tggggagcctttcacag

SEQ ID NO: 179264 - DNA, 17 bp, synthetic construct
  source 1..17: mol_type = other DNA
ctggggagcctttcaca

SEQ ID NO: 179265 - DNA, 17 bp, synthetic construct
  source 1..17: mol_type = other DNA
tctggggagcctttcac

SEQ ID NO: 179266 - DNA, 17 bp, synthetic construct
  source 1..17: mol_type = other DNA
atctggggagcctttca

SEQ ID NO: 179267 - DNA, 17 bp, synthetic construct
  source 1..17: mol_type = other DNA
aatctggggagcctttc

SEQ ID NO: 179268 - DNA, 17 bp, synthetic construct
  source 1..17: mol_type = other DNA
gaatctggggagccttt

SEQ ID NO: 179269 - DNA, 17 bp, synthetic construct
  source 1..17: mol_type = other DNA
ggaatctggggagcctt

SEQ ID NO: 179270 - DNA, 17 bp, synthetic construct
  source 1..17: mol_type = other DNA
tggaatctggggagcct

SEQ ID NO: 179271 - DNA, 17 bp, synthetic construct
  source 1..17: mol_type = other DNA
ctggaatctggggagcc

SEQ ID NO: 179272 - DNA, 17 bp, synthetic construct
  source 1..17: mol_type = other DNA
gctggaatctggggagc

SEQ ID NO: 179273 - DNA, 17 bp, synthetic construct
  source 1..17: mol_type = other DNA
ggctggaatctggggag

SEQ ID NO: 179274 - DNA, 17 bp, synthetic construct
  source 1..17: mol_type = other DNA
gggctggaatctgggga

SEQ ID NO: 179275 - DNA, 17 bp, synthetic construct
  source 1..17: mol_type = other DNA
ggggctggaatctgggg

SEQ ID NO: 179276 - DNA, 17 bp, synthetic construct
  source 1..17: mol_type = other DNA
cggggctggaatctggg

SEQ ID NO: 179277 - DNA, 17 bp, synthetic construct
  source 1..17: mol_type = other DNA
gcggggctggaatctgg

SEQ ID NO: 179278 - DNA, 17 bp, synthetic construct
  source 1..17: mol_type = other DNA
cgcggggctggaatctg

SEQ ID NO: 179279 - DNA, 17 bp, synthetic construct
  source 1..17: mol_type = other DNA
ccgcggggctggaatct

SEQ ID NO: 179280 - DNA, 17 bp, synthetic construct
  source 1..17: mol_type = other DNA
accgcggggctggaatc

SEQ ID NO: 179281 - DNA, 17 bp, synthetic construct
  source 1..17: mol_type = other DNA
caccgcggggctggaat

SEQ ID NO: 179282 - DNA, 17 bp, synthetic construct
  source 1..17: mol_type = other DNA
tcaccgcggggctggaa

SEQ ID NO: 179283 - DNA, 17 bp, synthetic construct
  source 1..17: mol_type = other DNA
gtcaccgcggggctgga

SEQ ID NO: 179284 - DNA, 17 bp, synthetic construct
  source 1..17: mol_type = other DNA
cgtcaccgcggggctgg

SEQ ID NO: 179285 - DNA, 17 bp, synthetic construct
  source 1..17: mol_type = other DNA
gcgtcaccgcggggctg

SEQ ID NO: 179286 - DNA, 17 bp, synthetic construct
  source 1..17: mol_type = other DNA
ggcgtcaccgcggggct

SEQ ID NO: 179287 - DNA, 17 bp, synthetic construct
  source 1..17: mol_type = other DNA
gggcgtcaccgcggggc

SEQ ID NO: 179288 - DNA, 17 bp, synthetic construct
  source 1..17: mol_type = other DNA
ggggcgtcaccgcgggg

SEQ ID NO: 179289 - DNA, 17 bp, synthetic construct
  source 1..17: mol_type = other DNA
gggggcgtcaccgcggg

SEQ ID NO: 179290 - DNA, 17 bp, synthetic construct
  source 1..17: mol_type = other DNA
tgggggcgtcaccgcgg

SEQ ID NO: 179291 - DNA, 17 bp, synthetic construct
  source 1..17: mol_type = other DNA
gtgggggcgtcaccgcg

SEQ ID NO: 179292 - DNA, 17 bp, synthetic construct
  source 1..17: mol_type = other DNA
agtgggggcgtcaccgc

SEQ ID NO: 179293 - DNA, 17 bp, synthetic construct
  source 1..17: mol_type = other DNA
gagtgggggcgtcaccg

SEQ ID NO: 179294 - DNA, 17 bp, synthetic construct
  source 1..17: mol_type = other DNA
ggagtgggggcgtcacc

SEQ ID NO: 179295 - DNA, 17 bp, synthetic construct
  source 1..17: mol_type = other DNA
gggagtgggggcgtcac

SEQ ID NO: 179296 - DNA, 17 bp, synthetic construct
  source 1..17: mol_type = other DNA
tgggagtgggggcgtca

SEQ ID NO: 179297 - DNA, 17 bp, synthetic construct
  source 1..17: mol_type = other DNA
ctgggagtgggggcgtc

SEQ ID NO: 179298 - DNA, 17 bp, synthetic construct
  source 1..17: mol_type = other DNA
cctgggagtgggggcgt

SEQ ID NO: 179299 - DNA, 17 bp, synthetic construct
  source 1..17: mol_type = other DNA
gcctgggagtgggggcg

SEQ ID NO: 179300 - DNA, 17 bp, synthetic construct
  source 1..17: mol_type = other DNA
tgcctgggagtgggggc

SEQ ID NO: 179301 - DNA, 17 bp, synthetic construct
  source 1..17: mol_type = other DNA
gtgcctgggagtggggg

SEQ ID NO: 179302 - DNA, 17 bp, synthetic construct
  source 1..17: mol_type = other DNA
ggtgcctgggagtgggg

SEQ ID NO: 179303 - DNA, 17 bp, synthetic construct
  source 1..17: mol_type = other DNA
aggtgcctgggagtggg

SEQ ID NO: 179304 - DNA, 17 bp, synthetic construct
  source 1..17: mol_type = other DNA
caggtgcctgggagtgg

SEQ ID NO: 179305 - DNA, 17 bp, synthetic construct
  source 1..17: mol_type = other DNA
gcaggtgcctgggagtg

SEQ ID NO: 179306 - DNA, 17 bp, synthetic construct
  source 1..17: mol_type = other DNA
tgcaggtgcctgggagt

SEQ ID NO: 179307 - DNA, 17 bp, synthetic construct
  source 1..17: mol_type = other DNA
gtgcaggtgcctgggag

SEQ ID NO: 179308 - DNA, 17 bp, synthetic construct
  source 1..17: mol_type = other DNA
ggtgcaggtgcctggga

SEQ ID NO: 179309 - DNA, 17 bp, synthetic construct
  source 1..17: mol_type = other DNA
tggtgcaggtgcctggg

SEQ ID NO: 179310 - DNA, 17 bp, synthetic construct
  source 1..17: mol_type = other DNA
ttggtgcaggtgcctgg

SEQ ID NO: 179311 - DNA, 17 bp, synthetic construct
  source 1..17: mol_type = other DNA
gttggtgcaggtgcctg

SEQ ID NO: 179312 - DNA, 17 bp, synthetic construct
  source 1..17: mol_type = other DNA
tgttggtgcaggtgcct

SEQ ID NO: 179313 - DNA, 17 bp, synthetic construct
  source 1..17: mol_type = other DNA
ttgttggtgcaggtgcc

SEQ ID NO: 179314 - DNA, 17 bp, synthetic construct
  source 1..17: mol_type = other DNA
gttgttggtgcaggtgc

SEQ ID NO: 179315 - DNA, 17 bp, synthetic construct
  source 1..17: mol_type = other DNA
ggttgttggtgcaggtg

SEQ ID NO: 179316 - DNA, 17 bp, synthetic construct
  source 1..17: mol_type = other DNA
tggttgttggtgcaggt

SEQ ID NO: 179317 - DNA, 17 bp, synthetic construct
  source 1..17: mol_type = other DNA
ctggttgttggtgcagg

SEQ ID NO: 179318 - DNA, 17 bp, synthetic construct
  source 1..17: mol_type = other DNA
tctggttgttggtgcag

SEQ ID NO: 179319 - DNA, 17 bp, synthetic construct
  source 1..17: mol_type = other DNA
ctctggttgttggtgca

SEQ ID NO: 179320 - DNA, 17 bp, synthetic construct
  source 1..17: mol_type = other DNA
cctctggttgttggtgc

SEQ ID NO: 179321 - DNA, 17 bp, synthetic construct
  source 1..17: mol_type = other DNA
ccctctggttgttggtg

SEQ ID NO: 179322 - DNA, 17 bp, synthetic construct
  source 1..17: mol_type = other DNA
tccctctggttgttggt

SEQ ID NO: 179323 - DNA, 17 bp, synthetic construct
  source 1..17: mol_type = other DNA
gtccctctggttgttgg

SEQ ID NO: 179324 - DNA, 17 bp, synthetic construct
  source 1..17: mol_type = other DNA
cgtccctctggttgttg

SEQ ID NO: 179325 - DNA, 17 bp, synthetic construct
  source 1..17: mol_type = other DNA
tcgtccctctggttgtt

SEQ ID NO: 179326 - DNA, 17 bp, synthetic construct
  source 1..17: mol_type = other DNA
gtcgtccctctggttgt

SEQ ID NO: 179327 - DNA, 17 bp, synthetic construct
  source 1..17: mol_type = other DNA
agtcgtccctctggttg

SEQ ID NO: 179328 - DNA, 17 bp, synthetic construct
  source 1..17: mol_type = other DNA
cagtcgtccctctggtt

SEQ ID NO: 179329 - DNA, 17 bp, synthetic construct
  source 1..17: mol_type = other DNA
acagtcgtccctctggt

SEQ ID NO: 179330 - DNA, 17 bp, synthetic construct
  source 1..17: mol_type = other DNA
gacagtcgtccctctgg

SEQ ID NO: 179331 - DNA, 17 bp, synthetic construct
  source 1..17: mol_type = other DNA
agacagtcgtccctctg

SEQ ID NO: 179332 - DNA, 17 bp, synthetic construct
  source 1..17: mol_type = other DNA
gagacagtcgtccctct

SEQ ID NO: 179333 - DNA, 17 bp, synthetic construct
  source 1..17: mol_type = other DNA
ggagacagtcgtccctc

SEQ ID NO: 179334 - DNA, 17 bp, synthetic construct
  source 1..17: mol_type = other DNA
tggagacagtcgtccct

SEQ ID NO: 179335 - DNA, 17 bp, synthetic construct
  source 1..17: mol_type = other DNA
ctggagacagtcgtccc

SEQ ID NO: 179336 - DNA, 17 bp, synthetic construct
  source 1..17: mol_type = other DNA
gctggagacagtcgtcc

SEQ ID NO: 179337 - DNA, 17 bp, synthetic construct
  source 1..17: mol_type = other DNA
cgctggagacagtcgtc

SEQ ID NO: 179338 - DNA, 17 bp, synthetic construct
  source 1..17: mol_type = other DNA
ccgctggagacagtcgt

SEQ ID NO: 179339 - DNA, 17 bp, synthetic construct
  source 1..17: mol_type = other DNA
cccgctggagacagtcg

SEQ ID NO: 179340 - DNA, 17 bp, synthetic construct
  source 1..17: mol_type = other DNA
tcccgctggagacagtc

SEQ ID NO: 179341 - DNA, 17 bp, synthetic construct
  source 1..17: mol_type = other DNA
gtcccgctggagacagt

SEQ ID NO: 179342 - DNA, 17 bp, synthetic construct
  source 1..17: mol_type = other DNA
cgtcccgctggagacag

SEQ ID NO: 179343 - DNA, 17 bp, synthetic construct
  source 1..17: mol_type = other DNA
ccgtcccgctggagaca

SEQ ID NO: 179344 - DNA, 17 bp, synthetic construct
  source 1..17: mol_type = other DNA
tccgtcccgctggagac

SEQ ID NO: 179345 - DNA, 17 bp, synthetic construct
  source 1..17: mol_type = other DNA
ttccgtcccgctggaga

SEQ ID NO: 179346 - DNA, 17 bp, synthetic construct
  source 1..17: mol_type = other DNA
gttccgtcccgctggag

SEQ ID NO: 179347 - DNA, 17 bp, synthetic construct
  source 1..17: mol_type = other DNA
ggttccgtcccgctgga

SEQ ID NO: 179348 - DNA, 17 bp, synthetic construct
  source 1..17: mol_type = other DNA
tggttccgtcccgctgg

SEQ ID NO: 179349 - DNA, 17 bp, synthetic construct
  source 1..17: mol_type = other DNA
gtggttccgtcccgctg

SEQ ID NO: 179350 - DNA, 17 bp, synthetic construct
  source 1..17: mol_type = other DNA
agtggttccgtcccgct

SEQ ID NO: 179351 - DNA, 17 bp, synthetic construct
  source 1..17: mol_type = other DNA
cagtggttccgtcccgc

SEQ ID NO: 179352 - DNA, 17 bp, synthetic construct
  source 1..17: mol_type = other DNA
gcagtggttccgtcccg

SEQ ID NO: 179353 - DNA, 17 bp, synthetic construct
  source 1..17: mol_type = other DNA
ggcagtggttccgtccc

SEQ ID NO: 179354 - DNA, 17 bp, synthetic construct
  source 1..17: mol_type = other DNA
cggcagtggttccgtcc

SEQ ID NO: 179355 - DNA, 17 bp, synthetic construct
  source 1..17: mol_type = other DNA
gcggcagtggttccgtc

SEQ ID NO: 179356 - DNA, 17 bp, synthetic construct
  source 1..17: mol_type = other DNA
ggcggcagtggttccgt

SEQ ID NO: 179357 - DNA, 17 bp, synthetic construct
  source 1..17: mol_type = other DNA
tggcggcagtggttccg

SEQ ID NO: 179358 - DNA, 17 bp, synthetic construct
  source 1..17: mol_type = other DNA
ctggcggcagtggttcc

SEQ ID NO: 179359 - DNA, 17 bp, synthetic construct
  source 1..17: mol_type = other DNA
actggcggcagtggttc

SEQ ID NO: 179360 - DNA, 17 bp, synthetic construct
  source 1..17: mol_type = other DNA
aactggcggcagtggtt

SEQ ID NO: 179361 - DNA, 17 bp, synthetic construct
  source 1..17: mol_type = other DNA
caactggcggcagtggt

SEQ ID NO: 179362 - DNA, 17 bp, synthetic construct
  source 1..17: mol_type = other DNA
gcaactggcggcagtgg

SEQ ID NO: 179363 - DNA, 17 bp, synthetic construct
  source 1..17: mol_type = other DNA
tgcaactggcggcagtg

SEQ ID NO: 179364 - DNA, 17 bp, synthetic construct
  source 1..17: mol_type = other DNA
ttgcaactggcggcagt

SEQ ID NO: 179365 - DNA, 17 bp, synthetic construct
  source 1..17: mol_type = other DNA
cttgcaactggcggcag

SEQ ID NO: 179366 - DNA, 17 bp, synthetic construct
  source 1..17: mol_type = other DNA
ccttgcaactggcggca

SEQ ID NO: 179367 - DNA, 17 bp, synthetic construct
  source 1..17: mol_type = other DNA
tccttgcaactggcggc

SEQ ID NO: 179368 - DNA, 17 bp, synthetic construct
  source 1..17: mol_type = other DNA
gtccttgcaactggcgg

SEQ ID NO: 179369 - DNA, 17 bp, synthetic construct
  source 1..17: mol_type = other DNA
tgtccttgcaactggcg

SEQ ID NO: 179370 - DNA, 17 bp, synthetic construct
  source 1..17: mol_type = other DNA
atgtccttgcaactggc

SEQ ID NO: 179371 - DNA, 17 bp, synthetic construct
  source 1..17: mol_type = other DNA
catgtccttgcaactgg

SEQ ID NO: 179372 - DNA, 17 bp, synthetic construct
  source 1..17: mol_type = other DNA
ccatgtccttgcaactg

SEQ ID NO: 179373 - DNA, 17 bp, synthetic construct
  source 1..17: mol_type = other DNA
gccatgtccttgcaact

SEQ ID NO: 179374 - DNA, 17 bp, synthetic construct
  source 1..17: mol_type = other DNA
ggccatgtccttgcaac

SEQ ID NO: 179375 - DNA, 17 bp, synthetic construct
  source 1..17: mol_type = other DNA
tggccatgtccttgcaa

SEQ ID NO: 179376 - DNA, 17 bp, synthetic construct
  source 1..17: mol_type = other DNA
ttggccatgtccttgca

SEQ ID NO: 179377 - DNA, 17 bp, synthetic construct
  source 1..17: mol_type = other DNA
cttggccatgtccttgc

SEQ ID NO: 179378 - DNA, 17 bp, synthetic construct
  source 1..17: mol_type = other DNA
tcttggccatgtccttg

SEQ ID NO: 179379 - DNA, 17 bp, synthetic construct
  source 1..17: mol_type = other DNA
gtcttggccatgtcctt

SEQ ID NO: 179380 - DNA, 17 bp, synthetic construct
  source 1..17: mol_type = other DNA
cgtcttggccatgtcct

SEQ ID NO: 179381 - DNA, 17 bp, synthetic construct
  source 1..17: mol_type = other DNA
acgtcttggccatgtcc

SEQ ID NO: 179382 - DNA, 17 bp, synthetic construct
  source 1..17: mol_type = other DNA
cacgtcttggccatgtc

SEQ ID NO: 179383 - DNA, 17 bp, synthetic construct
  source 1..17: mol_type = other DNA
ccacgtcttggccatgt

SEQ ID NO: 179384 - DNA, 17 bp, synthetic construct
  source 1..17: mol_type = other DNA
gccacgtcttggccatg

SEQ ID NO: 179385 - DNA, 17 bp, synthetic construct
  source 1..17: mol_type = other DNA
agccacgtcttggccat

SEQ ID NO: 179386 - DNA, 17 bp, synthetic construct
  source 1..17: mol_type = other DNA
cagccacgtcttggcca

SEQ ID NO: 179387 - DNA, 17 bp, synthetic construct
  source 1..17: mol_type = other DNA
ccagccacgtcttggcc

SEQ ID NO: 179388 - DNA, 17 bp, synthetic construct
  source 1..17: mol_type = other DNA
accagccacgtcttggc

SEQ ID NO: 179389 - DNA, 17 bp, synthetic construct
  source 1..17: mol_type = other DNA
gaccagccacgtcttgg

SEQ ID NO: 179390 - DNA, 17 bp, synthetic construct
  source 1..17: mol_type = other DNA
ggaccagccacgtcttg

SEQ ID NO: 179391 - DNA, 17 bp, synthetic construct
  source 1..17: mol_type = other DNA
gggaccagccacgtctt

SEQ ID NO: 179392 - DNA, 17 bp, synthetic construct
  source 1..17: mol_type = other DNA
ggggaccagccacgtct

SEQ ID NO: 179393 - DNA, 17 bp, synthetic construct
  source 1..17: mol_type = other DNA
cggggaccagccacgtc

SEQ ID NO: 179394 - DNA, 17 bp, synthetic construct
  source 1..17: mol_type = other DNA
tcggggaccagccacgt

SEQ ID NO: 179395 - DNA, 17 bp, synthetic construct
  source 1..17: mol_type = other DNA
gtcggggaccagccacg

SEQ ID NO: 179396 - DNA, 17 bp, synthetic construct
  source 1..17: mol_type = other DNA
tgtcggggaccagccac

SEQ ID NO: 179397 - DNA, 17 bp, synthetic construct
  source 1..17: mol_type = other DNA
ctgtcggggaccagcca

SEQ ID NO: 179398 - DNA, 17 bp, synthetic construct
  source 1..17: mol_type = other DNA
gctgtcggggaccagcc

SEQ ID NO: 179399 - DNA, 17 bp, synthetic construct
  source 1..17: mol_type = other DNA
tgctgtcggggaccagc

SEQ ID NO: 179400 - DNA, 17 bp, synthetic construct
  source 1..17: mol_type = other DNA
ctgctgtcggggaccag

SEQ ID NO: 179401 - DNA, 17 bp, synthetic construct
  source 1..17: mol_type = other DNA
tctgctgtcggggacca

SEQ ID NO: 179402 - DNA, 17 bp, synthetic construct
  source 1..17: mol_type = other DNA
ttctgctgtcggggacc

SEQ ID NO: 179403 - DNA, 17 bp, synthetic construct
  source 1..17: mol_type = other DNA
tttctgctgtcggggac

SEQ ID NO: 179404 - DNA, 17 bp, synthetic construct
  source 1..17: mol_type = other DNA
ctttctgctgtcgggga

SEQ ID NO: 179405 - DNA, 17 bp, synthetic construct
  source 1..17: mol_type = other DNA
cctttctgctgtcgggg

SEQ ID NO: 179406 - DNA, 17 bp, synthetic construct
  source 1..17: mol_type = other DNA
tcctttctgctgtcggg

SEQ ID NO: 179407 - DNA, 17 bp, synthetic construct
  source 1..17: mol_type = other DNA
atcctttctgctgtcgg

SEQ ID NO: 179408 - DNA, 17 bp, synthetic construct
  source 1..17: mol_type = other DNA
catcctttctgctgtcg

SEQ ID NO: 179409 - DNA, 17 bp, synthetic construct
  source 1..17: mol_type = other DNA
ccatcctttctgctgtc

SEQ ID NO: 179410 - DNA, 17 bp, synthetic construct
  source 1..17: mol_type = other DNA
gccatcctttctgctgt

SEQ ID NO: 179411 - DNA, 17 bp, synthetic construct
  source 1..17: mol_type = other DNA
agccatcctttctgctg

SEQ ID NO: 179412 - DNA, 17 bp, synthetic construct
  source 1..17: mol_type = other DNA
cagccatcctttctgct

SEQ ID NO: 179413 - DNA, 17 bp, synthetic construct
  source 1..17: mol_type = other DNA
gcagccatcctttctgc

SEQ ID NO: 179414 - DNA, 17 bp, synthetic construct
  source 1..17: mol_type = other DNA
agcagccatcctttctg

SEQ ID NO: 179415 - DNA, 17 bp, synthetic construct
  source 1..17: mol_type = other DNA
cagcagccatcctttct

SEQ ID NO: 179416 - DNA, 17 bp, synthetic construct
  source 1..17: mol_type = other DNA
ccagcagccatcctttc

SEQ ID NO: 179417 - DNA, 17 bp, synthetic construct
  source 1..17: mol_type = other DNA
cccagcagccatccttt

SEQ ID NO: 179418 - DNA, 17 bp, synthetic construct
  source 1..17: mol_type = other DNA
gcccagcagccatcctt

SEQ ID NO: 179419 - DNA, 17 bp, synthetic construct
  source 1..17: mol_type = other DNA
ggcccagcagccatcct

SEQ ID NO: 179420 - DNA, 17 bp, synthetic construct
  source 1..17: mol_type = other DNA
gggcccagcagccatcc

SEQ ID NO: 179421 - DNA, 17 bp, synthetic construct
  source 1..17: mol_type = other DNA
ggggcccagcagccatc

SEQ ID NO: 179422 - DNA, 17 bp, synthetic construct
  source 1..17: mol_type = other DNA
cggggcccagcagccat

SEQ ID NO: 179423 - DNA, 17 bp, synthetic construct
  source 1..17: mol_type = other DNA
tcggggcccagcagcca

SEQ ID NO: 179424 - DNA, 17 bp, synthetic construct
  source 1..17: mol_type = other DNA
gtcggggcccagcagcc

SEQ ID NO: 179425 - DNA, 17 bp, synthetic construct
  source 1..17: mol_type = other DNA
agtcggggcccagcagc

SEQ ID NO: 179426 - DNA, 17 bp, synthetic construct
  source 1..17: mol_type = other DNA
cagtcggggcccagcag

SEQ ID NO: 179427 - DNA, 17 bp, synthetic construct
  source 1..17: mol_type = other DNA
ccagtcggggcccagca

SEQ ID NO: 179428 - DNA, 17 bp, synthetic construct
  source 1..17: mol_type = other DNA
gccagtcggggcccagc

SEQ ID NO: 179429 - DNA, 17 bp, synthetic construct
  source 1..17: mol_type = other DNA
tgccagtcggggcccag

SEQ ID NO: 179430 - DNA, 17 bp, synthetic construct
  source 1..17: mol_type = other DNA
gtgccagtcggggccca

SEQ ID NO: 179431 - DNA, 17 bp, synthetic construct
  source 1..17: mol_type = other DNA
tgtgccagtcggggccc

SEQ ID NO: 179432 - DNA, 17 bp, synthetic construct
  source 1..17: mol_type = other DNA
gtgtgccagtcggggcc

SEQ ID NO: 179433 - DNA, 17 bp, synthetic construct
  source 1..17: mol_type = other DNA
ggtgtgccagtcggggc

SEQ ID NO: 179434 - DNA, 17 bp, synthetic construct
  source 1..17: mol_type = other DNA
gggtgtgccagtcgggg

SEQ ID NO: 179435 - DNA, 17 bp, synthetic construct
  source 1..17: mol_type = other DNA
ggggtgtgccagtcggg

SEQ ID NO: 179436 - DNA, 17 bp, synthetic construct
  source 1..17: mol_type = other DNA
gggggtgtgccagtcgg

SEQ ID NO: 179437 - DNA, 17 bp, synthetic construct
  source 1..17: mol_type = other DNA
ggggggtgtgccagtcg

SEQ ID NO: 179438 - DNA, 17 bp, synthetic construct
  source 1..17: mol_type = other DNA
tggggggtgtgccagtc

SEQ ID NO: 179439 - DNA, 17 bp, synthetic construct
  source 1..17: mol_type = other DNA
gtggggggtgtgccagt

SEQ ID NO: 179440 - DNA, 17 bp, synthetic construct
  source 1..17: mol_type = other DNA
agtggggggtgtgccag

SEQ ID NO: 179441 - DNA, 17 bp, synthetic construct
  source 1..17: mol_type = other DNA
cagtggggggtgtgcca

SEQ ID NO: 179442 - DNA, 17 bp, synthetic construct
  source 1..17: mol_type = other DNA
gcagtggggggtgtgcc

SEQ ID NO: 179443 - DNA, 17 bp, synthetic construct
  source 1..17: mol_type = other DNA
ggcagtggggggtgtgc

SEQ ID NO: 179444 - DNA, 17 bp, synthetic construct
  source 1..17: mol_type = other DNA
tggcagtggggggtgtg

SEQ ID NO: 179445 - DNA, 17 bp, synthetic construct
  source 1..17: mol_type = other DNA
ctggcagtggggggtgt

SEQ ID NO: 179446 - DNA, 17 bp, synthetic construct
  source 1..17: mol_type = other DNA
gctggcagtggggggtg

SEQ ID NO: 179447 - DNA, 17 bp, synthetic construct
  source 1..17: mol_type = other DNA
ggctggcagtggggggt

SEQ ID NO: 179448 - DNA, 17 bp, synthetic construct
  source 1..17: mol_type = other DNA
gggctggcagtgggggg

SEQ ID NO: 179449 - DNA, 17 bp, synthetic construct
  source 1..17: mol_type = other DNA
ggggctggcagtggggg

SEQ ID NO: 179450 - DNA, 17 bp, synthetic construct
  source 1..17: mol_type = other DNA
cggggctggcagtgggg

SEQ ID NO: 179451 - DNA, 17 bp, synthetic construct
  source 1..17: mol_type = other DNA
gcggggctggcagtggg

SEQ ID NO: 179452 - DNA, 17 bp, synthetic construct
  source 1..17: mol_type = other DNA
tgcggggctggcagtgg

SEQ ID NO: 179453 - DNA, 17 bp, synthetic construct
  source 1..17: mol_type = other DNA
ctgcggggctggcagtg

SEQ ID NO: 179454 - DNA, 17 bp, synthetic construct
  source 1..17: mol_type = other DNA
gctgcggggctggcagt

SEQ ID NO: 179455 - DNA, 17 bp, synthetic construct
  source 1..17: mol_type = other DNA
ggctgcggggctggcag

SEQ ID NO: 179456 - DNA, 17 bp, synthetic construct
  source 1..17: mol_type = other DNA
gggctgcggggctggca

SEQ ID NO: 179457 - DNA, 17 bp, synthetic construct
  source 1..17: mol_type = other DNA
ggggctgcggggctggc

SEQ ID NO: 179458 - DNA, 17 bp, synthetic construct
  source 1..17: mol_type = other DNA
cggggctgcggggctgg

SEQ ID NO: 179459 - DNA, 17 bp, synthetic construct
  source 1..17: mol_type = other DNA
ccggggctgcggggctg

SEQ ID NO: 179460 - DNA, 17 bp, synthetic construct
  source 1..17: mol_type = other DNA
accggggctgcggggct

SEQ ID NO: 179461 - DNA, 17 bp, synthetic construct
  source 1..17: mol_type = other DNA
caccggggctgcggggc

SEQ ID NO: 179462 - DNA, 17 bp, synthetic construct
  source 1..17: mol_type = other DNA
acaccggggctgcgggg

SEQ ID NO: 179463 - DNA, 17 bp, synthetic construct
  source 1..17: mol_type = other DNA
gacaccggggctgcggg

SEQ ID NO: 179464 - DNA, 17 bp, synthetic construct
  source 1..17: mol_type = other DNA
agacaccggggctgcgg

SEQ ID NO: 179465 - DNA, 17 bp, synthetic construct
  source 1..17: mol_type = other DNA
tagacaccggggctgcg

SEQ ID NO: 179466 - DNA, 17 bp, synthetic construct
  source 1..17: mol_type = other DNA
ctagacaccggggctgc

SEQ ID NO: 179467 - DNA, 17 bp, synthetic construct
  source 1..17: mol_type = other DNA
gctagacaccggggctg

SEQ ID NO: 179468 - DNA, 17 bp, synthetic construct
  source 1..17: mol_type = other DNA
tgctagacaccggggct

SEQ ID NO: 179469 - DNA, 17 bp, synthetic construct
  source 1..17: mol_type = other DNA
gtgctagacaccggggc

SEQ ID NO: 179470 - DNA, 17 bp, synthetic construct
  source 1..17: mol_type = other DNA
tgtgctagacaccgggg

SEQ ID NO: 179471 - DNA, 17 bp, synthetic construct
  source 1..17: mol_type = other DNA
gtgtgctagacaccggg

SEQ ID NO: 179472 - DNA, 17 bp, synthetic construct
  source 1..17: mol_type = other DNA
ggtgtgctagacaccgg

SEQ ID NO: 179473 - DNA, 17 bp, synthetic construct
  source 1..17: mol_type = other DNA
gggtgtgctagacaccg

SEQ ID NO: 179474 - DNA, 17 bp, synthetic construct
  source 1..17: mol_type = other DNA
tgggtgtgctagacacc

SEQ ID NO: 179475 - DNA, 17 bp, synthetic construct
  source 1..17: mol_type = other DNA
gtgggtgtgctagacac

SEQ ID NO: 179476 - DNA, 17 bp, synthetic construct
  source 1..17: mol_type = other DNA
ggtgggtgtgctagaca

SEQ ID NO: 179477 - DNA, 17 bp, synthetic construct
  source 1..17: mol_type = other DNA
gggtgggtgtgctagac

SEQ ID NO: 179478 - DNA, 17 bp, synthetic construct
  source 1..17: mol_type = other DNA
ggggtgggtgtgctaga

SEQ ID NO: 179479 - DNA, 17 bp, synthetic construct
  source 1..17: mol_type = other DNA
gggggtgggtgtgctag

SEQ ID NO: 179480 - DNA, 17 bp, synthetic construct
  source 1..17: mol_type = other DNA
tgggggtgggtgtgcta

SEQ ID NO: 179481 - DNA, 17 bp, synthetic construct
  source 1..17: mol_type = other DNA
gtgggggtgggtgtgct

SEQ ID NO: 179482 - DNA, 17 bp, synthetic construct
  source 1..17: mol_type = other DNA
ggtgggggtgggtgtgc

SEQ ID NO: 179483 - DNA, 17 bp, synthetic construct
  source 1..17: mol_type = other DNA
gggtgggggtgggtgtg

SEQ ID NO: 179484 - DNA, 17 bp, synthetic construct
  source 1..17: mol_type = other DNA
ggggtgggggtgggtgt

SEQ ID NO: 179485 - DNA, 17 bp, synthetic construct
  source 1..17: mol_type = other DNA
tggggtgggggtgggtg

SEQ ID NO: 179486 - DNA, 17 bp, synthetic construct
  source 1..17: mol_type = other DNA
atggggtgggggtgggt

SEQ ID NO: 179487 - DNA, 17 bp, synthetic construct
  source 1..17: mol_type = other DNA
catggggtgggggtggg

SEQ ID NO: 179488 - DNA, 17 bp, synthetic construct
  source 1..17: mol_type = other DNA
gcatggggtgggggtgg

SEQ ID NO: 179489 - DNA, 17 bp, synthetic construct
  source 1..17: mol_type = other DNA
ggcatggggtgggggtg

SEQ ID NO: 179490 - DNA, 17 bp, synthetic construct
  source 1..17: mol_type = other DNA
gggcatggggtgggggt

SEQ ID NO: 179491 - DNA, 17 bp, synthetic construct
  source 1..17: mol_type = other DNA
tgggcatggggtggggg

SEQ ID NO: 179492 - DNA, 17 bp, synthetic construct
  source 1..17: mol_type = other DNA
gtgggcatggggtgggg

SEQ ID NO: 179493 - DNA, 17 bp, synthetic construct
  source 1..17: mol_type = other DNA
ggtgggcatggggtggg

SEQ ID NO: 179494 - DNA, 17 bp, synthetic construct
  source 1..17: mol_type = other DNA
tggtgggcatggggtgg

SEQ ID NO: 179495 - DNA, 17 bp, synthetic construct
  source 1..17: mol_type = other DNA
gtggtgggcatggggtg

SEQ ID NO: 179496 - DNA, 17 bp, synthetic construct
  source 1..17: mol_type = other DNA
tgtggtgggcatggggt

SEQ ID NO: 179497 - DNA, 17 bp, synthetic construct
  source 1..17: mol_type = other DNA
ctgtggtgggcatgggg

SEQ ID NO: 179498 - DNA, 17 bp, synthetic construct
  source 1..17: mol_type = other DNA
gctgtggtgggcatggg

SEQ ID NO: 179499 - DNA, 17 bp, synthetic construct
  source 1..17: mol_type = other DNA
ggctgtggtgggcatgg

SEQ ID NO: 179500 - DNA, 17 bp, synthetic construct
  source 1..17: mol_type = other DNA
cggctgtggtgggcatg

SEQ ID NO: 179501 - DNA, 17 bp, synthetic construct
  source 1..17: mol_type = other DNA
gcggctgtggtgggcat

SEQ ID NO: 179502 - DNA, 17 bp, synthetic construct
  source 1..17: mol_type = other DNA
agcggctgtggtgggca

SEQ ID NO: 179503 - DNA, 17 bp, synthetic construct
  source 1..17: mol_type = other DNA
gagcggctgtggtgggc

SEQ ID NO: 179504 - DNA, 17 bp, synthetic construct
  source 1..17: mol_type = other DNA
agagcggctgtggtggg

SEQ ID NO: 179505 - DNA, 17 bp, synthetic construct
  source 1..17: mol_type = other DNA
cagagcggctgtggtgg

SEQ ID NO: 179506 - DNA, 17 bp, synthetic construct
  source 1..17: mol_type = other DNA
acagagcggctgtggtg

SEQ ID NO: 179507 - DNA, 17 bp, synthetic construct
  source 1..17: mol_type = other DNA
cacagagcggctgtggt

SEQ ID NO: 179508 - DNA, 17 bp, synthetic construct
  source 1..17: mol_type = other DNA
tcacagagcggctgtgg

SEQ ID NO: 179509 - DNA, 17 bp, synthetic construct
  source 1..17: mol_type = other DNA
atcacagagcggctgtg

SEQ ID NO: 179510 - DNA, 17 bp, synthetic construct
  source 1..17: mol_type = other DNA
gatcacagagcggctgt

SEQ ID NO: 179511 - DNA, 17 bp, synthetic construct
  source 1..17: mol_type = other DNA
agatcacagagcggctg

SEQ ID NO: 179512 - DNA, 17 bp, synthetic construct
  source 1..17: mol_type = other DNA
cagatcacagagcggct

SEQ ID NO: 179513 - DNA, 17 bp, synthetic construct
  source 1..17: mol_type = other DNA
tcagatcacagagcggc

SEQ ID NO: 179514 - DNA, 17 bp, synthetic construct
  source 1..17: mol_type = other DNA
atcagatcacagagcgg

SEQ ID NO: 179515 - DNA, 17 bp, synthetic construct
  source 1..17: mol_type = other DNA
catcagatcacagagcg

SEQ ID NO: 179516 - DNA, 17 bp, synthetic construct
  source 1..17: mol_type = other DNA
gcatcagatcacagagc

SEQ ID NO: 179517 - DNA, 17 bp, synthetic construct
  source 1..17: mol_type = other DNA
agcatcagatcacagag

SEQ ID NO: 179518 - DNA, 17 bp, synthetic construct
  source 1..17: mol_type = other DNA
cagcatcagatcacaga

SEQ ID NO: 179519 - DNA, 17 bp, synthetic construct
  source 1..17: mol_type = other DNA
tcagcatcagatcacag

SEQ ID NO: 179520 - DNA, 17 bp, synthetic construct
  source 1..17: mol_type = other DNA
ctcagcatcagatcaca

SEQ ID NO: 179521 - DNA, 17 bp, synthetic construct
  source 1..17: mol_type = other DNA
gctcagcatcagatcac

SEQ ID NO: 179522 - DNA, 17 bp, synthetic construct
  source 1..17: mol_type = other DNA
ggctcagcatcagatca

SEQ ID NO: 179523 - DNA, 17 bp, synthetic construct
  source 1..17: mol_type = other DNA
tggctcagcatcagatc

SEQ ID NO: 179524 - DNA, 17 bp, synthetic construct
  source 1..17: mol_type = other DNA
ctggctcagcatcagat

SEQ ID NO: 179525 - DNA, 17 bp, synthetic construct
  source 1..17: mol_type = other DNA
actggctcagcatcaga

SEQ ID NO: 179526 - DNA, 17 bp, synthetic construct
  source 1..17: mol_type = other DNA
cactggctcagcatcag

SEQ ID NO: 179527 - DNA, 17 bp, synthetic construct
  source 1..17: mol_type = other DNA
tcactggctcagcatca

SEQ ID NO: 179528 - DNA, 17 bp, synthetic construct
  source 1..17: mol_type = other DNA
ctcactggctcagcatc

SEQ ID NO: 179529 - DNA, 17 bp, synthetic construct
  source 1..17: mol_type = other DNA
actcactggctcagcat

SEQ ID NO: 179530 - DNA, 17 bp, synthetic construct
  source 1..17: mol_type = other DNA
gactcactggctcagca

SEQ ID NO: 179531 - DNA, 17 bp, synthetic construct
  source 1..17: mol_type = other DNA
ggactcactggctcagc

SEQ ID NO: 179532 - DNA, 17 bp, synthetic construct
  source 1..17: mol_type = other DNA
aggactcactggctcag

SEQ ID NO: 179533 - DNA, 17 bp, synthetic construct
  source 1..17: mol_type = other DNA
gaggactcactggctca

SEQ ID NO: 179534 - DNA, 17 bp, synthetic construct
  source 1..17: mol_type = other DNA
ggaggactcactggctc

SEQ ID NO: 179535 - DNA, 17 bp, synthetic construct
  source 1..17: mol_type = other DNA
gggaggactcactggct

SEQ ID NO: 179536 - DNA, 17 bp, synthetic construct
  source 1..17: mol_type = other DNA
ggggaggactcactggc

SEQ ID NO: 179537 - DNA, 17 bp, synthetic construct
  source 1..17: mol_type = other DNA
aggggaggactcactgg

SEQ ID NO: 179538 - DNA, 17 bp, synthetic construct
  source 1..17: mol_type = other DNA
gaggggaggactcactg

SEQ ID NO: 179539 - DNA, 17 bp, synthetic construct
  source 1..17: mol_type = other DNA
cgaggggaggactcact

SEQ ID NO: 179540 - DNA, 17 bp, synthetic construct
  source 1..17: mol_type = other DNA
ccgaggggaggactcac

SEQ ID NO: 179541 - DNA, 17 bp, synthetic construct
  source 1..17: mol_type = other DNA
cccgaggggaggactca

SEQ ID NO: 179542 - DNA, 17 bp, synthetic construct
  source 1..17: mol_type = other DNA
ccccgaggggaggactc

SEQ ID NO: 179543 - DNA, 17 bp, synthetic construct
  source 1..17: mol_type = other DNA
cccccgaggggaggact

SEQ ID NO: 179544 - DNA, 17 bp, synthetic construct
  source 1..17: mol_type = other DNA
acccccgaggggaggac

SEQ ID NO: 179545 - DNA, 17 bp, synthetic construct
  source 1..17: mol_type = other DNA
aacccccgaggggagga

SEQ ID NO: 179546 - DNA, 17 bp, synthetic construct
  source 1..17: mol_type = other DNA
caacccccgaggggagg

SEQ ID NO: 179547 - DNA, 17 bp, synthetic construct
  source 1..17: mol_type = other DNA
gcaacccccgaggggag

SEQ ID NO: 179548 - DNA, 17 bp, synthetic construct
  source 1..17: mol_type = other DNA
tgcaacccccgagggga

SEQ ID NO: 179549 - DNA, 17 bp, synthetic construct
  source 1..17: mol_type = other DNA
ctgcaacccccgagggg

SEQ ID NO: 179550 - DNA, 17 bp, synthetic construct
  source 1..17: mol_type = other DNA
cctgcaacccccgaggg

SEQ ID NO: 179551 - DNA, 17 bp, synthetic construct
  source 1..17: mol_type = other DNA
gcctgcaacccccgagg

SEQ ID NO: 179552 - DNA, 17 bp, synthetic construct
  source 1..17: mol_type = other DNA
ggcctgcaacccccgag

SEQ ID NO: 179553 - DNA, 17 bp, synthetic construct
  source 1..17: mol_type = other DNA
gggcctgcaacccccga

SEQ ID NO: 179554 - DNA, 17 bp, synthetic construct
  source 1..17: mol_type = other DNA
agggcctgcaacccccg

SEQ ID NO: 179555 - DNA, 17 bp, synthetic construct
  source 1..17: mol_type = other DNA
cagggcctgcaaccccc

SEQ ID NO: 179556 - DNA, 17 bp, synthetic construct
  source 1..17: mol_type = other DNA
ccagggcctgcaacccc

SEQ ID NO: 179557 - DNA, 17 bp, synthetic construct
  source 1..17: mol_type = other DNA
cccagggcctgcaaccc

SEQ ID NO: 179558 - DNA, 17 bp, synthetic construct
  source 1..17: mol_type = other DNA
ccccagggcctgcaacc

SEQ ID NO: 179559 - DNA, 17 bp, synthetic construct
  source 1..17: mol_type = other DNA
gccccagggcctgcaac

SEQ ID NO: 179560 - DNA, 17 bp, synthetic construct
  source 1..17: mol_type = other DNA
cgccccagggcctgcaa

SEQ ID NO: 179561 - DNA, 17 bp, synthetic construct
  source 1..17: mol_type = other DNA
gcgccccagggcctgca

SEQ ID NO: 179562 - DNA, 17 bp, synthetic construct
  source 1..17: mol_type = other DNA
ggcgccccagggcctgc

SEQ ID NO: 179563 - DNA, 17 bp, synthetic construct
  source 1..17: mol_type = other DNA
gggcgccccagggcctg

SEQ ID NO: 179564 - DNA, 17 bp, synthetic construct
  source 1..17: mol_type = other DNA
ggggcgccccagggcct

SEQ ID NO: 179565 - DNA, 17 bp, synthetic construct
  source 1..17: mol_type = other DNA
gggggcgccccagggcc

SEQ ID NO: 179566 - DNA, 17 bp, synthetic construct
  source 1..17: mol_type = other DNA
cgggggcgccccagggc

SEQ ID NO: 179567 - DNA, 17 bp, synthetic construct
  source 1..17: mol_type = other DNA
gcgggggcgccccaggg

SEQ ID NO: 179568 - DNA, 17 bp, synthetic construct
  source 1..17: mol_type = other DNA
ggcgggggcgccccagg

SEQ ID NO: 179569 - DNA, 17 bp, synthetic construct
  source 1..17: mol_type = other DNA
gggcgggggcgccccag

SEQ ID NO: 179570 - DNA, 17 bp, synthetic construct
  source 1..17: mol_type = other DNA
cgggcgggggcgcccca

SEQ ID NO: 179571 - DNA, 17 bp, synthetic construct
  source 1..17: mol_type = other DNA
gcgggcgggggcgcccc

SEQ ID NO: 179572 - DNA, 17 bp, synthetic construct
  source 1..17: mol_type = other DNA
ggcgggcgggggcgccc

SEQ ID NO: 179573 - DNA, 17 bp, synthetic construct
  source 1..17: mol_type = other DNA
gggcgggcgggggcgcc

SEQ ID NO: 179574 - DNA, 17 bp, synthetic construct
  source 1..17: mol_type = other DNA
cgggcgggcgggggcgc

SEQ ID NO: 179575 - DNA, 17 bp, synthetic construct
  source 1..17: mol_type = other DNA
gcgggcgggcgggggcg

SEQ ID NO: 179576 - DNA, 17 bp, synthetic construct
  source 1..17: mol_type = other DNA
tgcgggcgggcgggggc

SEQ ID NO: 179577 - DNA, 17 bp, synthetic construct
  source 1..17: mol_type = other DNA
atgcgggcgggcggggg

SEQ ID NO: 179578 - DNA, 17 bp, synthetic construct
  source 1..17: mol_type = other DNA
catgcgggcgggcgggg

SEQ ID NO: 179579 - DNA, 17 bp, synthetic construct
  source 1..17: mol_type = other DNA
gcatgcgggcgggcggg

SEQ ID NO: 179580 - DNA, 17 bp, synthetic construct
  source 1..17: mol_type = other DNA
tgcatgcgggcgggcgg

SEQ ID NO: 179581 - DNA, 17 bp, synthetic construct
  source 1..17: mol_type = other DNA
gtgcatgcgggcgggcg

SEQ ID NO: 179582 - DNA, 17 bp, synthetic construct
  source 1..17: mol_type = other DNA
cgtgcatgcgggcgggc

SEQ ID NO: 179583 - DNA, 17 bp, synthetic construct
  source 1..17: mol_type = other DNA
gcgtgcatgcgggcggg

SEQ ID NO: 179584 - DNA, 17 bp, synthetic construct
  source 1..17: mol_type = other DNA
tgcgtgcatgcgggcgg

SEQ ID NO: 179585 - DNA, 17 bp, synthetic construct
  source 1..17: mol_type = other DNA
gtgcgtgcatgcgggcg

SEQ ID NO: 179586 - DNA, 17 bp, synthetic construct
  source 1..17: mol_type = other DNA
cgtgcgtgcatgcgggc

SEQ ID NO: 179587 - DNA, 17 bp, synthetic construct
  source 1..17: mol_type = other DNA
gcgtgcgtgcatgcggg

SEQ ID NO: 179588 - DNA, 17 bp, synthetic construct
  source 1..17: mol_type = other DNA
tgcgtgcgtgcatgcgg

SEQ ID NO: 179589 - DNA, 17 bp, synthetic construct
  source 1..17: mol_type = other DNA
gtgcgtgcgtgcatgcg

SEQ ID NO: 179590 - DNA, 17 bp, synthetic construct
  source 1..17: mol_type = other DNA
cgtgcgtgcgtgcatgc

SEQ ID NO: 179591 - DNA, 17 bp, synthetic construct
  source 1..17: mol_type = other DNA
gcgtgcgtgcgtgcatg

SEQ ID NO: 179592 - DNA, 17 bp, synthetic construct
  source 1..17: mol_type = other DNA
tgcgtgcgtgcgtgcat

SEQ ID NO: 179593 - DNA, 17 bp, synthetic construct
  source 1..17: mol_type = other DNA
ctgcgtgcgtgcgtgca

SEQ ID NO: 179594 - DNA, 17 bp, synthetic construct
  source 1..17: mol_type = other DNA
gctgcgtgcgtgcgtgc

SEQ ID NO: 179595 - DNA, 17 bp, synthetic construct
  source 1..17: mol_type = other DNA
agctgcgtgcgtgcgtg

SEQ ID NO: 179596 - DNA, 17 bp, synthetic construct
  source 1..17: mol_type = other DNA
gagctgcgtgcgtgcgt

SEQ ID NO: 179597 - DNA, 17 bp, synthetic construct
  source 1..17: mol_type = other DNA
ggagctgcgtgcgtgcg

SEQ ID NO: 179598 - DNA, 17 bp, synthetic construct
  source 1..17: mol_type = other DNA
gggagctgcgtgcgtgc

SEQ ID NO: 179599 - DNA, 17 bp, synthetic construct
  source 1..17: mol_type = other DNA
agggagctgcgtgcgtg

SEQ ID NO: 179600 - DNA, 17 bp, synthetic construct
  source 1..17: mol_type = other DNA
cagggagctgcgtgcgt

SEQ ID NO: 179601 - DNA, 17 bp, synthetic construct
  source 1..17: mol_type = other DNA
ccagggagctgcgtgcg

SEQ ID NO: 179602 - DNA, 17 bp, synthetic construct
  source 1..17: mol_type = other DNA
cccagggagctgcgtgc

SEQ ID NO: 179603 - DNA, 17 bp, synthetic construct
  source 1..17: mol_type = other DNA
ccccagggagctgcgtg

SEQ ID NO: 179604 - DNA, 17 bp, synthetic construct
  source 1..17: mol_type = other DNA
gccccagggagctgcgt

SEQ ID NO: 179605 - DNA, 17 bp, synthetic construct
  source 1..17: mol_type = other DNA
agccccagggagctgcg

SEQ ID NO: 179606 - DNA, 17 bp, synthetic construct
  source 1..17: mol_type = other DNA
cagccccagggagctgc

SEQ ID NO: 179607 - DNA, 17 bp, synthetic construct
  source 1..17: mol_type = other DNA
ccagccccagggagctg

SEQ ID NO: 179608 - DNA, 17 bp, synthetic construct
  source 1..17: mol_type = other DNA
cccagccccagggagct

SEQ ID NO: 179609 - DNA, 17 bp, synthetic construct
  source 1..17: mol_type = other DNA
ccccagccccagggagc

SEQ ID NO: 179610 - DNA, 17 bp, synthetic construct
  source 1..17: mol_type = other DNA
cccccagccccagggag

SEQ ID NO: 179611 - DNA, 17 bp, synthetic construct
  source 1..17: mol_type = other DNA
gcccccagccccaggga

SEQ ID NO: 179612 - DNA, 17 bp, synthetic construct
  source 1..17: mol_type = other DNA
ggcccccagccccaggg

SEQ ID NO: 179613 - DNA, 17 bp, synthetic construct
  source 1..17: mol_type = other DNA
gggcccccagccccagg

SEQ ID NO: 179614 - DNA, 17 bp, synthetic construct
  source 1..17: mol_type = other DNA
agggcccccagccccag

SEQ ID NO: 179615 - DNA, 17 bp, synthetic construct
  source 1..17: mol_type = other DNA
gagggcccccagcccca

SEQ ID NO: 179616 - DNA, 17 bp, synthetic construct
  source 1..17: mol_type = other DNA
ggagggcccccagcccc

SEQ ID NO: 179617 - DNA, 17 bp, synthetic construct
  source 1..17: mol_type = other DNA
cggagggcccccagccc

SEQ ID NO: 179618 - DNA, 17 bp, synthetic construct
  source 1..17: mol_type = other DNA
acggagggcccccagcc

SEQ ID NO: 179619 - DNA, 17 bp, synthetic construct
  source 1..17: mol_type = other DNA
gacggagggcccccagc

SEQ ID NO: 179620 - DNA, 17 bp, synthetic construct
  source 1..17: mol_type = other DNA
ggacggagggcccccag

SEQ ID NO: 179621 - DNA, 17 bp, synthetic construct
  source 1..17: mol_type = other DNA
aggacggagggccccca

SEQ ID NO: 179622 - DNA, 17 bp, synthetic construct
  source 1..17: mol_type = other DNA
caggacggagggccccc

SEQ ID NO: 179623 - DNA, 17 bp, synthetic construct
  source 1..17: mol_type = other DNA
tcaggacggagggcccc

SEQ ID NO: 179624 - DNA, 17 bp, synthetic construct
  source 1..17: mol_type = other DNA
atcaggacggagggccc

SEQ ID NO: 179625 - DNA, 17 bp, synthetic construct
  source 1..17: mol_type = other DNA
gatcaggacggagggcc

SEQ ID NO: 179626 - DNA, 17 bp, synthetic construct
  source 1..17: mol_type = other DNA
cgatcaggacggagggc

SEQ ID NO: 179627 - DNA, 17 bp, synthetic construct
  source 1..17: mol_type = other DNA
gcgatcaggacggaggg

SEQ ID NO: 179628 - DNA, 17 bp, synthetic construct
  source 1..17: mol_type = other DNA
agcgatcaggacggagg

SEQ ID NO: 179629 - DNA, 17 bp, synthetic construct
  source 1..17: mol_type = other DNA
aagcgatcaggacggag

SEQ ID NO: 179630 - DNA, 17 bp, synthetic construct
  source 1..17: mol_type = other DNA
aaagcgatcaggacgga

SEQ ID NO: 179631 - DNA, 17 bp, synthetic construct
  source 1..17: mol_type = other DNA
caaagcgatcaggacgg

SEQ ID NO: 179632 - DNA, 17 bp, synthetic construct
  source 1..17: mol_type = other DNA
gcaaagcgatcaggacg

SEQ ID NO: 179633 - DNA, 17 bp, synthetic construct
  source 1..17: mol_type = other DNA
ggcaaagcgatcaggac

SEQ ID NO: 179634 - DNA, 17 bp, synthetic construct
  source 1..17: mol_type = other DNA
gggcaaagcgatcagga

SEQ ID NO: 179635 - DNA, 17 bp, synthetic construct
  source 1..17: mol_type = other DNA
ggggcaaagcgatcagg

SEQ ID NO: 179636 - DNA, 17 bp, synthetic construct
  source 1..17: mol_type = other DNA
tggggcaaagcgatcag

SEQ ID NO: 179637 - DNA, 17 bp, synthetic construct
  source 1..17: mol_type = other DNA
gtggggcaaagcgatca

SEQ ID NO: 179638 - DNA, 17 bp, synthetic construct
  source 1..17: mol_type = other DNA
tgtggggcaaagcgatc

SEQ ID NO: 179639 - DNA, 17 bp, synthetic construct
  source 1..17: mol_type = other DNA
ctgtggggcaaagcgat

SEQ ID NO: 179640 - DNA, 17 bp, synthetic construct
  source 1..17: mol_type = other DNA
cctgtggggcaaagcga

SEQ ID NO: 179641 - DNA, 17 bp, synthetic construct
  source 1..17: mol_type = other DNA
ccctgtggggcaaagcg

SEQ ID NO: 179642 - DNA, 17 bp, synthetic construct
  source 1..17: mol_type = other DNA
accctgtggggcaaagc

SEQ ID NO: 179643 - DNA, 17 bp, synthetic construct
  source 1..17: mol_type = other DNA
gaccctgtggggcaaag

SEQ ID NO: 179644 - DNA, 17 bp, synthetic construct
  source 1..17: mol_type = other DNA
agaccctgtggggcaaa

SEQ ID NO: 179645 - DNA, 17 bp, synthetic construct
  source 1..17: mol_type = other DNA
aagaccctgtggggcaa

SEQ ID NO: 179646 - DNA, 17 bp, synthetic construct
  source 1..17: mol_type = other DNA
aaagaccctgtggggca

SEQ ID NO: 179647 - DNA, 17 bp, synthetic construct
  source 1..17: mol_type = other DNA
caaagaccctgtggggc

SEQ ID NO: 179648 - DNA, 17 bp, synthetic construct
  source 1..17: mol_type = other DNA
gcaaagaccctgtgggg

SEQ ID NO: 179649 - DNA, 17 bp, synthetic construct
  source 1..17: mol_type = other DNA
agcaaagaccctgtggg

SEQ ID NO: 179650 - DNA, 17 bp, synthetic construct
  source 1..17: mol_type = other DNA
cagcaaagaccctgtgg

SEQ ID NO: 179651 - DNA, 17 bp, synthetic construct
  source 1..17: mol_type = other DNA
tcagcaaagaccctgtg

SEQ ID NO: 179652 - DNA, 17 bp, synthetic construct
  source 1..17: mol_type = other DNA
ctcagcaaagaccctgt

SEQ ID NO: 179653 - DNA, 17 bp, synthetic construct
  source 1..17: mol_type = other DNA
actcagcaaagaccctg

SEQ ID NO: 179654 - DNA, 17 bp, synthetic construct
  source 1..17: mol_type = other DNA
cactcagcaaagaccct

SEQ ID NO: 179655 - DNA, 17 bp, synthetic construct
  source 1..17: mol_type = other DNA
gcactcagcaaagaccc

SEQ ID NO: 179656 - DNA, 17 bp, synthetic construct
  source 1..17: mol_type = other DNA
ggcactcagcaaagacc

SEQ ID NO: 179657 - DNA, 17 bp, synthetic construct
  source 1..17: mol_type = other DNA
tggcactcagcaaagac

SEQ ID NO: 179658 - DNA, 17 bp, synthetic construct
  source 1..17: mol_type = other DNA
gtggcactcagcaaaga

SEQ ID NO: 179659 - DNA, 17 bp, synthetic construct
  source 1..17: mol_type = other DNA
tgtggcactcagcaaag

SEQ ID NO: 179660 - DNA, 17 bp, synthetic construct
  source 1..17: mol_type = other DNA
ttgtggcactcagcaaa

SEQ ID NO: 179661 - DNA, 17 bp, synthetic construct
  source 1..17: mol_type = other DNA
gttgtggcactcagcaa

SEQ ID NO: 179662 - DNA, 17 bp, synthetic construct
  source 1..17: mol_type = other DNA
ggttgtggcactcagca

SEQ ID NO: 179663 - DNA, 17 bp, synthetic construct
  source 1..17: mol_type = other DNA
aggttgtggcactcagc

SEQ ID NO: 179664 - DNA, 17 bp, synthetic construct
  source 1..17: mol_type = other DNA
aaggttgtggcactcag

SEQ ID NO: 179665 - DNA, 17 bp, synthetic construct
  source 1..17: mol_type = other DNA
caaggttgtggcactca

SEQ ID NO: 179666 - DNA, 17 bp, synthetic construct
  source 1..17: mol_type = other DNA
acaaggttgtggcactc

SEQ ID NO: 179667 - DNA, 17 bp, synthetic construct
  source 1..17: mol_type = other DNA
cacaaggttgtggcact

SEQ ID NO: 179668 - DNA, 17 bp, synthetic construct
  source 1..17: mol_type = other DNA
gcacaaggttgtggcac

SEQ ID NO: 179669 - DNA, 17 bp, synthetic construct
  source 1..17: mol_type = other DNA
ggcacaaggttgtggca

SEQ ID NO: 179670 - DNA, 17 bp, synthetic construct
  source 1..17: mol_type = other DNA
gggcacaaggttgtggc

SEQ ID NO: 179671 - DNA, 17 bp, synthetic construct
  source 1..17: mol_type = other DNA
ggggcacaaggttgtgg

SEQ ID NO: 179672 - DNA, 17 bp, synthetic construct
  source 1..17: mol_type = other DNA
gggggcacaaggttgtg

SEQ ID NO: 179673 - DNA, 17 bp, synthetic construct
  source 1..17: mol_type = other DNA
cgggggcacaaggttgt

SEQ ID NO: 179674 - DNA, 17 bp, synthetic construct
  source 1..17: mol_type = other DNA
ccgggggcacaaggttg

SEQ ID NO: 179675 - DNA, 17 bp, synthetic construct
  source 1..17: mol_type = other DNA
cccgggggcacaaggtt

SEQ ID NO: 179676 - DNA, 17 bp, synthetic construct
  source 1..17: mol_type = other DNA
gcccgggggcacaaggt

SEQ ID NO: 179677 - DNA, 17 bp, synthetic construct
  source 1..17: mol_type = other DNA
ggcccgggggcacaagg

SEQ ID NO: 179678 - DNA, 17 bp, synthetic construct
  source 1..17: mol_type = other DNA
gggcccgggggcacaag

SEQ ID NO: 179679 - DNA, 17 bp, synthetic construct
  source 1..17: mol_type = other DNA
tgggcccgggggcacaa

SEQ ID NO: 179680 - DNA, 17 bp, synthetic construct
  source 1..17: mol_type = other DNA
atgggcccgggggcaca

SEQ ID NO: 179681 - DNA, 17 bp, synthetic construct
  source 1..17: mol_type = other DNA
aatgggcccgggggcac

SEQ ID NO: 179682 - DNA, 17 bp, synthetic construct
  source 1..17: mol_type = other DNA
gaatgggcccgggggca

SEQ ID NO: 179683 - DNA, 17 bp, synthetic construct
  source 1..17: mol_type = other DNA
agaatgggcccgggggc

SEQ ID NO: 179684 - DNA, 17 bp, synthetic construct
  source 1..17: mol_type = other DNA
aagaatgggcccggggg

SEQ ID NO: 179685 - DNA, 17 bp, synthetic construct
  source 1..17: mol_type = other DNA
gaagaatgggcccgggg

SEQ ID NO: 179686 - DNA, 17 bp, synthetic construct
  source 1..17: mol_type = other DNA
tgaagaatgggcccggg

SEQ ID NO: 179687 - DNA, 17 bp, synthetic construct
  source 1..17: mol_type = other DNA
ttgaagaatgggcccgg

SEQ ID NO: 179688 - DNA, 17 bp, synthetic construct
  source 1..17: mol_type = other DNA
gttgaagaatgggcccg

SEQ ID NO: 179689 - DNA, 17 bp, synthetic construct
  source 1..17: mol_type = other DNA
cgttgaagaatgggccc

SEQ ID NO: 179690 - DNA, 17 bp, synthetic construct
  source 1..17: mol_type = other DNA
gcgttgaagaatgggcc

SEQ ID NO: 179691 - DNA, 17 bp, synthetic construct
  source 1..17: mol_type = other DNA
ggcgttgaagaatgggc

SEQ ID NO: 179692 - DNA, 17 bp, synthetic construct
  source 1..17: mol_type = other DNA
aggcgttgaagaatggg

SEQ ID NO: 179693 - DNA, 17 bp, synthetic construct
  source 1..17: mol_type = other DNA
caggcgttgaagaatgg

SEQ ID NO: 179694 - DNA, 17 bp, synthetic construct
  source 1..17: mol_type = other DNA
gcaggcgttgaagaatg

SEQ ID NO: 179695 - DNA, 17 bp, synthetic construct
  source 1..17: mol_type = other DNA
tgcaggcgttgaagaat

SEQ ID NO: 179696 - DNA, 17 bp, synthetic construct
  source 1..17: mol_type = other DNA
atgcaggcgttgaagaa

SEQ ID NO: 179697 - DNA, 17 bp, synthetic construct
  source 1..17: mol_type = other DNA
gatgcaggcgttgaaga

SEQ ID NO: 179698 - DNA, 17 bp, synthetic construct
  source 1..17: mol_type = other DNA
tgatgcaggcgttgaag

SEQ ID NO: 179699 - DNA, 17 bp, synthetic construct
  source 1..17: mol_type = other DNA
ctgatgcaggcgttgaa

SEQ ID NO: 179700 - DNA, 17 bp, synthetic construct
  source 1..17: mol_type = other DNA
gctgatgcaggcgttga

SEQ ID NO: 179701 - DNA, 17 bp, synthetic construct
  source 1..17: mol_type = other DNA
cgctgatgcaggcgttg

SEQ ID NO: 179702 - DNA, 17 bp, synthetic construct
  source 1..17: mol_type = other DNA
tcgctgatgcaggcgtt

SEQ ID NO: 179703 - DNA, 17 bp, synthetic construct
  source 1..17: mol_type = other DNA
gtcgctgatgcaggcgt

SEQ ID NO: 179704 - DNA, 17 bp, synthetic construct
  source 1..17: mol_type = other DNA
ggtcgctgatgcaggcg

SEQ ID NO: 179705 - DNA, 17 bp, synthetic construct
  source 1..17: mol_type = other DNA
tggtcgctgatgcaggc

SEQ ID NO: 179706 - DNA, 17 bp, synthetic construct
  source 1..17: mol_type = other DNA
gtggtcgctgatgcagg

SEQ ID NO: 179707 - DNA, 17 bp, synthetic construct
  source 1..17: mol_type = other DNA
agtggtcgctgatgcag

SEQ ID NO: 179708 - DNA, 17 bp, synthetic construct
  source 1..17: mol_type = other DNA
cagtggtcgctgatgca

SEQ ID NO: 179709 - DNA, 17 bp, synthetic construct
  source 1..17: mol_type = other DNA
gcagtggtcgctgatgc

SEQ ID NO: 179710 - DNA, 17 bp, synthetic construct
  source 1..17: mol_type = other DNA
tgcagtggtcgctgatg

SEQ ID NO: 179711 - DNA, 17 bp, synthetic construct
  source 1..17: mol_type = other DNA
ctgcagtggtcgctgat

SEQ ID NO: 179712 - DNA, 17 bp, synthetic construct
  source 1..17: mol_type = other DNA
cctgcagtggtcgctga

SEQ ID NO: 179713 - DNA, 17 bp, synthetic construct
  source 1..17: mol_type = other DNA
ccctgcagtggtcgctg

SEQ ID NO: 179714 - DNA, 17 bp, synthetic construct
  source 1..17: mol_type = other DNA
cccctgcagtggtcgct

SEQ ID NO: 179715 - DNA, 17 bp, synthetic construct
  source 1..17: mol_type = other DNA
gcccctgcagtggtcgc

SEQ ID NO: 179716 - DNA, 17 bp, synthetic construct
  source 1..17: mol_type = other DNA
ggcccctgcagtggtcg

SEQ ID NO: 179717 - DNA, 17 bp, synthetic construct
  source 1..17: mol_type = other DNA
cggcccctgcagtggtc

SEQ ID NO: 179718 - DNA, 17 bp, synthetic construct
  source 1..17: mol_type = other DNA
gcggcccctgcagtggt

SEQ ID NO: 179719 - DNA, 17 bp, synthetic construct
  source 1..17: mol_type = other DNA
ggcggcccctgcagtgg

SEQ ID NO: 179720 - DNA, 17 bp, synthetic construct
  source 1..17: mol_type = other DNA
aggcggcccctgcagtg

SEQ ID NO: 179721 - DNA, 17 bp, synthetic construct
  source 1..17: mol_type = other DNA
aaggcggcccctgcagt

SEQ ID NO: 179722 - DNA, 17 bp, synthetic construct
  source 1..17: mol_type = other DNA
caaggcggcccctgcag

SEQ ID NO: 179723 - DNA, 17 bp, synthetic construct
  source 1..17: mol_type = other DNA
tcaaggcggcccctgca

SEQ ID NO: 179724 - DNA, 17 bp, synthetic construct
  source 1..17: mol_type = other DNA
ctcaaggcggcccctgc

SEQ ID NO: 179725 - DNA, 17 bp, synthetic construct
  source 1..17: mol_type = other DNA
cctcaaggcggcccctg

SEQ ID NO: 179726 - DNA, 17 bp, synthetic construct
  source 1..17: mol_type = other DNA
acctcaaggcggcccct

SEQ ID NO: 179727 - DNA, 17 bp, synthetic construct
  source 1..17: mol_type = other DNA
cacctcaaggcggcccc

SEQ ID NO: 179728 - DNA, 17 bp, synthetic construct
  source 1..17: mol_type = other DNA
gcacctcaaggcggccc

SEQ ID NO: 179729 - DNA, 17 bp, synthetic construct
  source 1..17: mol_type = other DNA
ggcacctcaaggcggcc

SEQ ID NO: 179730 - DNA, 17 bp, synthetic construct
  source 1..17: mol_type = other DNA
gggcacctcaaggcggc

SEQ ID NO: 179731 - DNA, 17 bp, synthetic construct
  source 1..17: mol_type = other DNA
agggcacctcaaggcgg

SEQ ID NO: 179732 - DNA, 17 bp, synthetic construct
  source 1..17: mol_type = other DNA
cagggcacctcaaggcg

SEQ ID NO: 179733 - DNA, 17 bp, synthetic construct
  source 1..17: mol_type = other DNA
gcagggcacctcaaggc

SEQ ID NO: 179734 - DNA, 17 bp, synthetic construct
  source 1..17: mol_type = other DNA
ggcagggcacctcaagg

SEQ ID NO: 179735 - DNA, 17 bp, synthetic construct
  source 1..17: mol_type = other DNA
tggcagggcacctcaag

SEQ ID NO: 179736 - DNA, 17 bp, synthetic construct
  source 1..17: mol_type = other DNA
ctggcagggcacctcaa

SEQ ID NO: 179737 - DNA, 17 bp, synthetic construct
  source 1..17: mol_type = other DNA
tctggcagggcacctca

SEQ ID NO: 179738 - DNA, 17 bp, synthetic construct
  source 1..17: mol_type = other DNA
ctctggcagggcacctc

SEQ ID NO: 179739 - DNA, 17 bp, synthetic construct
  source 1..17: mol_type = other DNA
gctctggcagggcacct

SEQ ID NO: 179740 - DNA, 17 bp, synthetic construct
  source 1..17: mol_type = other DNA
ggctctggcagggcacc

SEQ ID NO: 179741 - DNA, 17 bp, synthetic construct
  source 1..17: mol_type = other DNA
aggctctggcagggcac

SEQ ID NO: 179742 - DNA, 17 bp, synthetic construct
  source 1..17: mol_type = other DNA
caggctctggcagggca

SEQ ID NO: 179743 - DNA, 17 bp, synthetic construct
  source 1..17: mol_type = other DNA
ccaggctctggcagggc

SEQ ID NO: 179744 - DNA, 17 bp, synthetic construct
  source 1..17: mol_type = other DNA
tccaggctctggcaggg

SEQ ID NO: 179745 - DNA, 17 bp, synthetic construct
  source 1..17: mol_type = other DNA
ctccaggctctggcagg

SEQ ID NO: 179746 - DNA, 17 bp, synthetic construct
  source 1..17: mol_type = other DNA
cctccaggctctggcag

SEQ ID NO: 179747 - DNA, 17 bp, synthetic construct
  source 1..17: mol_type = other DNA
gcctccaggctctggca

SEQ ID NO: 179748 - DNA, 17 bp, synthetic construct
  source 1..17: mol_type = other DNA
agcctccaggctctggc

SEQ ID NO: 179749 - DNA, 17 bp, synthetic construct
  source 1..17: mol_type = other DNA
aagcctccaggctctgg

SEQ ID NO: 179750 - DNA, 17 bp, synthetic construct
  source 1..17: mol_type = other DNA
taagcctccaggctctg

SEQ ID NO: 179751 - DNA, 17 bp, synthetic construct
  source 1..17: mol_type = other DNA
gtaagcctccaggctct

SEQ ID NO: 179752 - DNA, 17 bp, synthetic construct
  source 1..17: mol_type = other DNA
cgtaagcctccaggctc

SEQ ID NO: 179753 - DNA, 17 bp, synthetic construct
  source 1..17: mol_type = other DNA
gcgtaagcctccaggct

SEQ ID NO: 179754 - DNA, 17 bp, synthetic construct
  source 1..17: mol_type = other DNA
tgcgtaagcctccaggc

SEQ ID NO: 179755 - DNA, 17 bp, synthetic construct
  source 1..17: mol_type = other DNA
ctgcgtaagcctccagg

SEQ ID NO: 179756 - DNA, 17 bp, synthetic construct
  source 1..17: mol_type = other DNA
tctgcgtaagcctccag

SEQ ID NO: 179757 - DNA, 17 bp, synthetic construct
  source 1..17: mol_type = other DNA
ctctgcgtaagcctcca

SEQ ID NO: 179758 - DNA, 17 bp, synthetic construct
  source 1..17: mol_type = other DNA
gctctgcgtaagcctcc

SEQ ID NO: 179759 - DNA, 17 bp, synthetic construct
  source 1..17: mol_type = other DNA
agctctgcgtaagcctc

SEQ ID NO: 179760 - DNA, 17 bp, synthetic construct
  source 1..17: mol_type = other DNA
gagctctgcgtaagcct

SEQ ID NO: 179761 - DNA, 17 bp, synthetic construct
  source 1..17: mol_type = other DNA
agagctctgcgtaagcc

SEQ ID NO: 179762 - DNA, 17 bp, synthetic construct
  source 1..17: mol_type = other DNA
cagagctctgcgtaagc

SEQ ID NO: 179763 - DNA, 17 bp, synthetic construct
  source 1..17: mol_type = other DNA
gcagagctctgcgtaag

SEQ ID NO: 179764 - DNA, 17 bp, synthetic construct
  source 1..17: mol_type = other DNA
ggcagagctctgcgtaa

SEQ ID NO: 179765 - DNA, 17 bp, synthetic construct
  source 1..17: mol_type = other DNA
cggcagagctctgcgta

SEQ ID NO: 179766 - DNA, 17 bp, synthetic construct
  source 1..17: mol_type = other DNA
gcggcagagctctgcgt

SEQ ID NO: 179767 - DNA, 17 bp, synthetic construct
  source 1..17: mol_type = other DNA
cgcggcagagctctgcg

SEQ ID NO: 179768 - DNA, 17 bp, synthetic construct
  source 1..17: mol_type = other DNA
gcgcggcagagctctgc

SEQ ID NO: 179769 - DNA, 17 bp, synthetic construct
  source 1..17: mol_type = other DNA
ggcgcggcagagctctg

SEQ ID NO: 179770 - DNA, 17 bp, synthetic construct
  source 1..17: mol_type = other DNA
gggcgcggcagagctct

SEQ ID NO: 179771 - DNA, 17 bp, synthetic construct
  source 1..17: mol_type = other DNA
cgggcgcggcagagctc

SEQ ID NO: 179772 - DNA, 17 bp, synthetic construct
  source 1..17: mol_type = other DNA
ccgggcgcggcagagct

SEQ ID NO: 179773 - DNA, 17 bp, synthetic construct
  source 1..17: mol_type = other DNA
cccgggcgcggcagagc

SEQ ID NO: 179774 - DNA, 17 bp, synthetic construct
  source 1..17: mol_type = other DNA
ccccgggcgcggcagag

SEQ ID NO: 179775 - DNA, 17 bp, synthetic construct
  source 1..17: mol_type = other DNA
tccccgggcgcggcaga

SEQ ID NO: 179776 - DNA, 17 bp, synthetic construct
  source 1..17: mol_type = other DNA
ctccccgggcgcggcag

SEQ ID NO: 179777 - DNA, 17 bp, synthetic construct
  source 1..17: mol_type = other DNA
actccccgggcgcggca

SEQ ID NO: 179778 - DNA, 17 bp, synthetic construct
  source 1..17: mol_type = other DNA
cactccccgggcgcggc

SEQ ID NO: 179779 - DNA, 17 bp, synthetic construct
  source 1..17: mol_type = other DNA
acactccccgggcgcgg

SEQ ID NO: 179780 - DNA, 17 bp, synthetic construct
  source 1..17: mol_type = other DNA
cacactccccgggcgcg

SEQ ID NO: 179781 - DNA, 17 bp, synthetic construct
  source 1..17: mol_type = other DNA
gcacactccccgggcgc

SEQ ID NO: 179782 - DNA, 17 bp, synthetic construct
  source 1..17: mol_type = other DNA
tgcacactccccgggcg

SEQ ID NO: 179783 - DNA, 17 bp, synthetic construct
  source 1..17: mol_type = other DNA
ctgcacactccccgggc

SEQ ID NO: 179784 - DNA, 17 bp, synthetic construct
  source 1..17: mol_type = other DNA
actgcacactccccggg

SEQ ID NO: 179785 - DNA, 17 bp, synthetic construct
  source 1..17: mol_type = other DNA
cactgcacactccccgg

SEQ ID NO: 179786 - DNA, 17 bp, synthetic construct
  source 1..17: mol_type = other DNA
tcactgcacactccccg

SEQ ID NO: 179787 - DNA, 17 bp, synthetic construct
  source 1..17: mol_type = other DNA
gtcactgcacactcccc

SEQ ID NO: 179788 - DNA, 17 bp, synthetic construct
  source 1..17: mol_type = other DNA
agtcactgcacactccc

SEQ ID NO: 179789 - DNA, 17 bp, synthetic construct
  source 1..17: mol_type = other DNA
cagtcactgcacactcc

SEQ ID NO: 179790 - DNA, 17 bp, synthetic construct
  source 1..17: mol_type = other DNA
ccagtcactgcacactc

SEQ ID NO: 179791 - DNA, 17 bp, synthetic construct
  source 1..17: mol_type = other DNA
gccagtcactgcacact

SEQ ID NO: 179792 - DNA, 17 bp, synthetic construct
  source 1..17: mol_type = other DNA
cgccagtcactgcacac

SEQ ID NO: 179793 - DNA, 17 bp, synthetic construct
  source 1..17: mol_type = other DNA
tcgccagtcactgcaca

SEQ ID NO: 179794 - DNA, 17 bp, synthetic construct
  source 1..17: mol_type = other DNA
ctcgccagtcactgcac

SEQ ID NO: 179795 - DNA, 17 bp, synthetic construct
  source 1..17: mol_type = other DNA
cctcgccagtcactgca

SEQ ID NO: 179796 - DNA, 17 bp, synthetic construct
  source 1..17: mol_type = other DNA
acctcgccagtcactgc

SEQ ID NO: 179797 - DNA, 17 bp, synthetic construct
  source 1..17: mol_type = other DNA
cacctcgccagtcactg

SEQ ID NO: 179798 - DNA, 17 bp, synthetic construct
  source 1..17: mol_type = other DNA
gcacctcgccagtcact

SEQ ID NO: 179799 - DNA, 17 bp, synthetic construct
  source 1..17: mol_type = other DNA
tgcacctcgccagtcac

SEQ ID NO: 179800 - DNA, 17 bp, synthetic construct
  source 1..17: mol_type = other DNA
ttgcacctcgccagtca

SEQ ID NO: 179801 - DNA, 17 bp, synthetic construct
  source 1..17: mol_type = other DNA
gttgcacctcgccagtc

SEQ ID NO: 179802 - DNA, 17 bp, synthetic construct
  source 1..17: mol_type = other DNA
ggttgcacctcgccagt

SEQ ID NO: 179803 - DNA, 17 bp, synthetic construct
  source 1..17: mol_type = other DNA
cggttgcacctcgccag

SEQ ID NO: 179804 - DNA, 17 bp, synthetic construct
  source 1..17: mol_type = other DNA
ccggttgcacctcgcca

SEQ ID NO: 179805 - DNA, 17 bp, synthetic construct
  source 1..17: mol_type = other DNA
accggttgcacctcgcc

SEQ ID NO: 179806 - DNA, 17 bp, synthetic construct
  source 1..17: mol_type = other DNA
caccggttgcacctcgc

SEQ ID NO: 179807 - DNA, 17 bp, synthetic construct
  source 1..17: mol_type = other DNA
ccaccggttgcacctcg

SEQ ID NO: 179808 - DNA, 17 bp, synthetic construct
  source 1..17: mol_type = other DNA
gccaccggttgcacctc

SEQ ID NO: 179809 - DNA, 17 bp, synthetic construct
  source 1..17: mol_type = other DNA
ggccaccggttgcacct

SEQ ID NO: 179810 - DNA, 17 bp, synthetic construct
  source 1..17: mol_type = other DNA
aggccaccggttgcacc

SEQ ID NO: 179811 - DNA, 17 bp, synthetic construct
  source 1..17: mol_type = other DNA
caggccaccggttgcac

SEQ ID NO: 179812 - DNA, 17 bp, synthetic construct
  source 1..17: mol_type = other DNA
acaggccaccggttgca

SEQ ID NO: 179813 - DNA, 17 bp, synthetic construct
  source 1..17: mol_type = other DNA
cacaggccaccggttgc

SEQ ID NO: 179814 - DNA, 17 bp, synthetic construct
  source 1..17: mol_type = other DNA
gcacaggccaccggttg

SEQ ID NO: 179815 - DNA, 17 bp, synthetic construct
  source 1..17: mol_type = other DNA
cgcacaggccaccggtt

SEQ ID NO: 179816 - DNA, 17 bp, synthetic construct
  source 1..17: mol_type = other DNA
ccgcacaggccaccggt

SEQ ID NO: 179817 - DNA, 17 bp, synthetic construct
  source 1..17: mol_type = other DNA
accgcacaggccaccgg

SEQ ID NO: 179818 - DNA, 17 bp, synthetic construct
  source 1..17: mol_type = other DNA
caccgcacaggccaccg

SEQ ID NO: 179819 - DNA, 17 bp, synthetic construct
  source 1..17: mol_type = other DNA
tcaccgcacaggccacc

SEQ ID NO: 179820 - DNA, 17 bp, synthetic construct
  source 1..17: mol_type = other DNA
ctcaccgcacaggccac

SEQ ID NO: 179821 - DNA, 17 bp, synthetic construct
  source 1..17: mol_type = other DNA
actcaccgcacaggcca

SEQ ID NO: 179822 - DNA, 17 bp, synthetic construct
  source 1..17: mol_type = other DNA
cactcaccgcacaggcc

SEQ ID NO: 179823 - DNA, 17 bp, synthetic construct
  source 1..17: mol_type = other DNA
ccactcaccgcacaggc

SEQ ID NO: 179824 - DNA, 17 bp, synthetic construct
  source 1..17: mol_type = other DNA
cccactcaccgcacagg

SEQ ID NO: 179825 - DNA, 17 bp, synthetic construct
  source 1..17: mol_type = other DNA
ccccactcaccgcacag

SEQ ID NO: 179826 - DNA, 17 bp, synthetic construct
  source 1..17: mol_type = other DNA
cccccactcaccgcaca

SEQ ID NO: 179827 - DNA, 17 bp, synthetic construct
  source 1..17: mol_type = other DNA
gcccccactcaccgcac

SEQ ID NO: 179828 - DNA, 17 bp, synthetic construct
  source 1..17: mol_type = other DNA
cgcccccactcaccgca

SEQ ID NO: 179829 - DNA, 17 bp, synthetic construct
  source 1..17: mol_type = other DNA
ccgcccccactcaccgc

SEQ ID NO: 179830 - DNA, 17 bp, synthetic construct
  source 1..17: mol_type = other DNA
gccgcccccactcaccg

SEQ ID NO: 179831 - DNA, 17 bp, synthetic construct
  source 1..17: mol_type = other DNA
ggccgcccccactcacc

SEQ ID NO: 179832 - DNA, 17 bp, synthetic construct
  source 1..17: mol_type = other DNA
gggccgcccccactcac

SEQ ID NO: 179833 - DNA, 17 bp, synthetic construct
  source 1..17: mol_type = other DNA
ggggccgcccccactca

SEQ ID NO: 179834 - DNA, 17 bp, synthetic construct
  source 1..17: mol_type = other DNA
cggggccgcccccactc

SEQ ID NO: 179835 - DNA, 17 bp, synthetic construct
  source 1..17: mol_type = other DNA
ccggggccgcccccact

SEQ ID NO: 179836 - DNA, 17 bp, synthetic construct
  source 1..17: mol_type = other DNA
cccggggccgcccccac

SEQ ID NO: 179837 - DNA, 17 bp, synthetic construct
  source 1..17: mol_type = other DNA
gcccggggccgccccca

SEQ ID NO: 179838 - DNA, 17 bp, synthetic construct
  source 1..17: mol_type = other DNA
ggcccggggccgccccc

SEQ ID NO: 179839 - DNA, 17 bp, synthetic construct
  source 1..17: mol_type = other DNA
gggcccggggccgcccc

SEQ ID NO: 179840 - DNA, 17 bp, synthetic construct
  source 1..17: mol_type = other DNA
ggggcccggggccgccc

SEQ ID NO: 179841 - DNA, 17 bp, synthetic construct
  source 1..17: mol_type = other DNA
gggggcccggggccgcc

SEQ ID NO: 179842 - DNA, 17 bp, synthetic construct
  source 1..17: mol_type = other DNA
ggggggcccggggccgc

SEQ ID NO: 179843 - DNA, 17 bp, synthetic construct
  source 1..17: mol_type = other DNA
tggggggcccggggccg

SEQ ID NO: 179844 - DNA, 17 bp, synthetic construct
  source 1..17: mol_type = other DNA
ctggggggcccggggcc

SEQ ID NO: 179845 - DNA, 17 bp, synthetic construct
  source 1..17: mol_type = other DNA
tctggggggcccggggc

SEQ ID NO: 179846 - DNA, 17 bp, synthetic construct
  source 1..17: mol_type = other DNA
gtctggggggcccgggg

SEQ ID NO: 179847 - DNA, 17 bp, synthetic construct
  source 1..17: mol_type = other DNA
ggtctggggggcccggg

SEQ ID NO: 179848 - DNA, 17 bp, synthetic construct
  source 1..17: mol_type = other DNA
gggtctggggggcccgg

SEQ ID NO: 179849 - DNA, 17 bp, synthetic construct
  source 1..17: mol_type = other DNA
ggggtctggggggcccg

SEQ ID NO: 179850 - DNA, 17 bp, synthetic construct
  source 1..17: mol_type = other DNA
aggggtctggggggccc

SEQ ID NO: 179851 - DNA, 17 bp, synthetic construct
  source 1..17: mol_type = other DNA
gaggggtctggggggcc

SEQ ID NO: 179852 - DNA, 17 bp, synthetic construct
  source 1..17: mol_type = other DNA
cgaggggtctggggggc

SEQ ID NO: 179853 - DNA, 17 bp, synthetic construct
  source 1..17: mol_type = other DNA
ccgaggggtctgggggg

SEQ ID NO: 179854 - DNA, 17 bp, synthetic construct
  source 1..17: mol_type = other DNA
gccgaggggtctggggg

SEQ ID NO: 179855 - DNA, 17 bp, synthetic construct
  source 1..17: mol_type = other DNA
ggccgaggggtctgggg

SEQ ID NO: 179856 - DNA, 17 bp, synthetic construct
  source 1..17: mol_type = other DNA
aggccgaggggtctggg

SEQ ID NO: 179857 - DNA, 17 bp, synthetic construct
  source 1..17: mol_type = other DNA
gaggccgaggggtctgg

SEQ ID NO: 179858 - DNA, 17 bp, synthetic construct
  source 1..17: mol_type = other DNA
agaggccgaggggtctg

SEQ ID NO: 179859 - DNA, 17 bp, synthetic construct
  source 1..17: mol_type = other DNA
gagaggccgaggggtct

SEQ ID NO: 179860 - DNA, 17 bp, synthetic construct
  source 1..17: mol_type = other DNA
agagaggccgaggggtc

SEQ ID NO: 179861 - DNA, 17 bp, synthetic construct
  source 1..17: mol_type = other DNA
cagagaggccgaggggt

SEQ ID NO: 179862 - DNA, 17 bp, synthetic construct
  source 1..17: mol_type = other DNA
tcagagaggccgagggg

SEQ ID NO: 179863 - DNA, 17 bp, synthetic construct
  source 1..17: mol_type = other DNA
ctcagagaggccgaggg

SEQ ID NO: 179864 - DNA, 17 bp, synthetic construct
  source 1..17: mol_type = other DNA
actcagagaggccgagg

SEQ ID NO: 179865 - DNA, 17 bp, synthetic construct
  source 1..17: mol_type = other DNA
cactcagagaggccgag

SEQ ID NO: 179866 - DNA, 17 bp, synthetic construct
  source 1..17: mol_type = other DNA
acactcagagaggccga

SEQ ID NO: 179867 - DNA, 17 bp, synthetic construct
  source 1..17: mol_type = other DNA
gacactcagagaggccg

SEQ ID NO: 179868 - DNA, 17 bp, synthetic construct
  source 1..17: mol_type = other DNA
ggacactcagagaggcc

SEQ ID NO: 179869 - DNA, 17 bp, synthetic construct
  source 1..17: mol_type = other DNA
aggacactcagagaggc

SEQ ID NO: 179870 - DNA, 17 bp, synthetic construct
  source 1..17: mol_type = other DNA
caggacactcagagagg

SEQ ID NO: 179871 - DNA, 17 bp, synthetic construct
  source 1..17: mol_type = other DNA
acaggacactcagagag

SEQ ID NO: 179872 - DNA, 17 bp, synthetic construct
  source 1..17: mol_type = other DNA
cacaggacactcagaga

SEQ ID NO: 179873 - DNA, 17 bp, synthetic construct
  source 1..17: mol_type = other DNA
gcacaggacactcagag

SEQ ID NO: 179874 - DNA, 17 bp, synthetic construct
  source 1..17: mol_type = other DNA
cgcacaggacactcaga

SEQ ID NO: 179875 - DNA, 17 bp, synthetic construct
  source 1..17: mol_type = other DNA
ccgcacaggacactcag

SEQ ID NO: 179876 - DNA, 17 bp, synthetic construct
  source 1..17: mol_type = other DNA
accgcacaggacactca

SEQ ID NO: 179877 - DNA, 17 bp, synthetic construct
  source 1..17: mol_type = other DNA
caccgcacaggacactc

SEQ ID NO: 179878 - DNA, 17 bp, synthetic construct
  source 1..17: mol_type = other DNA
tcaccgcacaggacact

SEQ ID NO: 179879 - DNA, 17 bp, synthetic construct
  source 1..17: mol_type = other DNA
ctcaccgcacaggacac

SEQ ID NO: 179880 - DNA, 17 bp, synthetic construct
  source 1..17: mol_type = other DNA
actcaccgcacaggaca

SEQ ID NO: 179881 - DNA, 17 bp, synthetic construct
  source 1..17: mol_type = other DNA
cactcaccgcacaggac

SEQ ID NO: 179882 - DNA, 17 bp, synthetic construct
  source 1..17: mol_type = other DNA
ccactcaccgcacagga

SEQ ID NO: 179883 - DNA, 17 bp, synthetic construct
  source 1..17: mol_type = other DNA
cccactcaccgcacagg

SEQ ID NO: 179884 - DNA, 17 bp, synthetic construct
  source 1..17: mol_type = other DNA
ccccactcaccgcacag

SEQ ID NO: 179885 - DNA, 17 bp, synthetic construct
  source 1..17: mol_type = other DNA
cccccactcaccgcaca

SEQ ID NO: 179886 - DNA, 17 bp, synthetic construct
  source 1..17: mol_type = other DNA
gcccccactcaccgcac

SEQ ID NO: 179887 - DNA, 17 bp, synthetic construct
  source 1..17: mol_type = other DNA
cgcccccactcaccgca

SEQ ID NO: 179888 - DNA, 17 bp, synthetic construct
  source 1..17: mol_type = other DNA
ccgcccccactcaccgc

SEQ ID NO: 179889 - DNA, 17 bp, synthetic construct
  source 1..17: mol_type = other DNA
gccgcccccactcaccg

SEQ ID NO: 179890 - DNA, 17 bp, synthetic construct
  source 1..17: mol_type = other DNA
ggccgcccccactcacc

SEQ ID NO: 179891 - DNA, 17 bp, synthetic construct
  source 1..17: mol_type = other DNA
gggccgcccccactcac

SEQ ID NO: 179892 - DNA, 17 bp, synthetic construct
  source 1..17: mol_type = other DNA
ggggccgcccccactca

SEQ ID NO: 179893 - DNA, 17 bp, synthetic construct
  source 1..17: mol_type = other DNA
cggggccgcccccactc

SEQ ID NO: 179894 - DNA, 17 bp, synthetic construct
  source 1..17: mol_type = other DNA
ccggggccgcccccact

SEQ ID NO: 179895 - DNA, 17 bp, synthetic construct
  source 1..17: mol_type = other DNA
cccggggccgcccccac

SEQ ID NO: 179896 - DNA, 17 bp, synthetic construct
  source 1..17: mol_type = other DNA
gcccggggccgccccca

SEQ ID NO: 179897 - DNA, 17 bp, synthetic construct
  source 1..17: mol_type = other DNA
ggcccggggccgccccc

SEQ ID NO: 179898 - DNA, 17 bp, synthetic construct
  source 1..17: mol_type = other DNA
gggcccggggccgcccc

SEQ ID NO: 179899 - DNA, 17 bp, synthetic construct
  source 1..17: mol_type = other DNA
ggggcccggggccgccc

SEQ ID NO: 179900 - DNA, 17 bp, synthetic construct
  source 1..17: mol_type = other DNA
gggggcccggggccgcc

SEQ ID NO: 179901 - DNA, 17 bp, synthetic construct
  source 1..17: mol_type = other DNA
ggggggcccggggccgc

SEQ ID NO: 179902 - DNA, 17 bp, synthetic construct
  source 1..17: mol_type = other DNA
tggggggcccggggccg

SEQ ID NO: 179903 - DNA, 17 bp, synthetic construct
  source 1..17: mol_type = other DNA
ctggggggcccggggcc

SEQ ID NO: 179904 - DNA, 17 bp, synthetic construct
  source 1..17: mol_type = other DNA
tctggggggcccggggc

SEQ ID NO: 179905 - DNA, 17 bp, synthetic construct
  source 1..17: mol_type = other DNA
gtctggggggcccgggg

SEQ ID NO: 179906 - DNA, 17 bp, synthetic construct
  source 1..17: mol_type = other DNA
ggtctggggggcccggg

SEQ ID NO: 179907 - DNA, 17 bp, synthetic construct
  source 1..17: mol_type = other DNA
gggtctggggggcccgg

SEQ ID NO: 179908 - DNA, 17 bp, synthetic construct
  source 1..17: mol_type = other DNA
ggggtctggggggcccg

SEQ ID NO: 179909 - DNA, 17 bp, synthetic construct
  source 1..17: mol_type = other DNA
aggggtctggggggccc

SEQ ID NO: 179910 - DNA, 17 bp, synthetic construct
  source 1..17: mol_type = other DNA
gaggggtctggggggcc

SEQ ID NO: 179911 - DNA, 17 bp, synthetic construct
  source 1..17: mol_type = other DNA
cgaggggtctggggggc

SEQ ID NO: 179912 - DNA, 17 bp, synthetic construct
  source 1..17: mol_type = other DNA
ccgaggggtctgggggg

SEQ ID NO: 179913 - DNA, 17 bp, synthetic construct
  source 1..17: mol_type = other DNA
gccgaggggtctggggg

SEQ ID NO: 179914 - DNA, 17 bp, synthetic construct
  source 1..17: mol_type = other DNA
ggccgaggggtctgggg

SEQ ID NO: 179915 - DNA, 17 bp, synthetic construct
  source 1..17: mol_type = other DNA
aggccgaggggtctggg

SEQ ID NO: 179916 - DNA, 17 bp, synthetic construct
  source 1..17: mol_type = other DNA
gaggccgaggggtctgg

SEQ ID NO: 179917 - DNA, 17 bp, synthetic construct
  source 1..17: mol_type = other DNA
agaggccgaggggtctg

SEQ ID NO: 179918 - DNA, 17 bp, synthetic construct
  source 1..17: mol_type = other DNA
gagaggccgaggggtct

SEQ ID NO: 179919 - DNA, 17 bp, synthetic construct
  source 1..17: mol_type = other DNA
agagaggccgaggggtc

SEQ ID NO: 179920 - DNA, 17 bp, synthetic construct
  source 1..17: mol_type = other DNA
cagagaggccgaggggt

SEQ ID NO: 179921 - DNA, 17 bp, synthetic construct
  source 1..17: mol_type = other DNA
tcagagaggccgagggg

SEQ ID NO: 179922 - DNA, 17 bp, synthetic construct
  source 1..17: mol_type = other DNA
ctcagagaggccgaggg

SEQ ID NO: 179923 - DNA, 17 bp, synthetic construct
  source 1..17: mol_type = other DNA
actcagagaggccgagg

SEQ ID NO: 179924 - DNA, 17 bp, synthetic construct
  source 1..17: mol_type = other DNA
cactcagagaggccgag

SEQ ID NO: 179925 - DNA, 17 bp, synthetic construct
  source 1..17: mol_type = other DNA
acactcagagaggccga

SEQ ID NO: 179926 - DNA, 17 bp, synthetic construct
  source 1..17: mol_type = other DNA
gacactcagagaggccg

SEQ ID NO: 179927 - DNA, 17 bp, synthetic construct
  source 1..17: mol_type = other DNA
ggacactcagagaggcc

SEQ ID NO: 179928 - DNA, 17 bp, synthetic construct
  source 1..17: mol_type = other DNA
aggacactcagagaggc

SEQ ID NO: 179929 - DNA, 17 bp, synthetic construct
  source 1..17: mol_type = other DNA
caggacactcagagagg

SEQ ID NO: 179930 - DNA, 17 bp, synthetic construct
  source 1..17: mol_type = other DNA
acaggacactcagagag

SEQ ID NO: 179931 - DNA, 17 bp, synthetic construct
  source 1..17: mol_type = other DNA
cacaggacactcagaga

SEQ ID NO: 179932 - DNA, 17 bp, synthetic construct
  source 1..17: mol_type = other DNA
gcacaggacactcagag

SEQ ID NO: 179933 - DNA, 17 bp, synthetic construct
  source 1..17: mol_type = other DNA
cgcacaggacactcaga

SEQ ID NO: 179934 - DNA, 17 bp, synthetic construct
  source 1..17: mol_type = other DNA
ccgcacaggacactcag

SEQ ID NO: 179935 - DNA, 17 bp, synthetic construct
  source 1..17: mol_type = other DNA
accgcacaggacactca

SEQ ID NO: 179936 - DNA, 17 bp, synthetic construct
  source 1..17: mol_type = other DNA
caccgcacaggacactc

SEQ ID NO: 179937 - DNA, 17 bp, synthetic construct
  source 1..17: mol_type = other DNA
tcaccgcacaggacact

SEQ ID NO: 179938 - DNA, 17 bp, synthetic construct
  source 1..17: mol_type = other DNA
ctcaccgcacaggacac

SEQ ID NO: 179939 - DNA, 17 bp, synthetic construct
  source 1..17: mol_type = other DNA
actcaccgcacaggaca

SEQ ID NO: 179940 - DNA, 17 bp, synthetic construct
  source 1..17: mol_type = other DNA
cactcaccgcacaggac

SEQ ID NO: 179941 - DNA, 17 bp, synthetic construct
  source 1..17: mol_type = other DNA
ccactcaccgcacagga

SEQ ID NO: 179942 - DNA, 17 bp, synthetic construct
  source 1..17: mol_type = other DNA
cccactcaccgcacagg

SEQ ID NO: 179943 - DNA, 17 bp, synthetic construct
  source 1..17: mol_type = other DNA
ccccactcaccgcacag

SEQ ID NO: 179944 - DNA, 17 bp, synthetic construct
  source 1..17: mol_type = other DNA
cccccactcaccgcaca

SEQ ID NO: 179945 - DNA, 17 bp, synthetic construct
  source 1..17: mol_type = other DNA
gcccccactcaccgcac

SEQ ID NO: 179946 - DNA, 17 bp, synthetic construct
  source 1..17: mol_type = other DNA
cgcccccactcaccgca

SEQ ID NO: 179947 - DNA, 17 bp, synthetic construct
  source 1..17: mol_type = other DNA
ccgcccccactcaccgc

SEQ ID NO: 179948 - DNA, 17 bp, synthetic construct
  source 1..17: mol_type = other DNA
gccgcccccactcaccg

SEQ ID NO: 179949 - DNA, 17 bp, synthetic construct
  source 1..17: mol_type = other DNA
ggccgcccccactcacc

SEQ ID NO: 179950 - DNA, 17 bp, synthetic construct
  source 1..17: mol_type = other DNA
gggccgcccccactcac

SEQ ID NO: 179951 - DNA, 17 bp, synthetic construct
  source 1..17: mol_type = other DNA
ggggccgcccccactca

SEQ ID NO: 179952 - DNA, 17 bp, synthetic construct
  source 1..17: mol_type = other DNA
cggggccgcccccactc

SEQ ID NO: 179953 - DNA, 17 bp, synthetic construct
  source 1..17: mol_type = other DNA
ccggggccgcccccact

SEQ ID NO: 179954 - DNA, 17 bp, synthetic construct
  source 1..17: mol_type = other DNA
cccggggccgcccccac

SEQ ID NO: 179955 - DNA, 17 bp, synthetic construct
  source 1..17: mol_type = other DNA
gcccggggccgccccca

SEQ ID NO: 179956 - DNA, 17 bp, synthetic construct
  source 1..17: mol_type = other DNA
ggcccggggccgccccc

SEQ ID NO: 179957 - DNA, 17 bp, synthetic construct
  source 1..17: mol_type = other DNA
gggcccggggccgcccc

SEQ ID NO: 179958 - DNA, 17 bp, synthetic construct
  source 1..17: mol_type = other DNA
ggggcccggggccgccc

SEQ ID NO: 179959 - DNA, 17 bp, synthetic construct
  source 1..17: mol_type = other DNA
gggggcccggggccgcc

SEQ ID NO: 179960 - DNA, 17 bp, synthetic construct
  source 1..17: mol_type = other DNA
ggggggcccggggccgc

SEQ ID NO: 179961 - DNA, 17 bp, synthetic construct
  source 1..17: mol_type = other DNA
tggggggcccggggccg

SEQ ID NO: 179962 - DNA, 17 bp, synthetic construct
  source 1..17: mol_type = other DNA
ctggggggcccggggcc

SEQ ID NO: 179963 - DNA, 17 bp, synthetic construct
  source 1..17: mol_type = other DNA
tctggggggcccggggc

SEQ ID NO: 179964 - DNA, 17 bp, synthetic construct
  source 1..17: mol_type = other DNA
gtctggggggcccgggg

SEQ ID NO: 179965 - DNA, 17 bp, synthetic construct
  source 1..17: mol_type = other DNA
ggtctggggggcccggg

SEQ ID NO: 179966 - DNA, 17 bp, synthetic construct
  source 1..17: mol_type = other DNA
gggtctggggggcccgg

SEQ ID NO: 179967 - DNA, 17 bp, synthetic construct
  source 1..17: mol_type = other DNA
ggggtctggggggcccg

SEQ ID NO: 179968 - DNA, 17 bp, synthetic construct
  source 1..17: mol_type = other DNA
aggggtctggggggccc

SEQ ID NO: 179969 - DNA, 17 bp, synthetic construct
  source 1..17: mol_type = other DNA
gaggggtctggggggcc

SEQ ID NO: 179970 - DNA, 17 bp, synthetic construct
  source 1..17: mol_type = other DNA
cgaggggtctggggggc

SEQ ID NO: 179971 - DNA, 17 bp, synthetic construct
  source 1..17: mol_type = other DNA
ccgaggggtctgggggg

SEQ ID NO: 179972 - DNA, 17 bp, synthetic construct
  source 1..17: mol_type = other DNA
gccgaggggtctggggg

SEQ ID NO: 179973 - DNA, 17 bp, synthetic construct
  source 1..17: mol_type = other DNA
ggccgaggggtctgggg

SEQ ID NO: 179974 - DNA, 17 bp, synthetic construct
  source 1..17: mol_type = other DNA
aggccgaggggtctggg

SEQ ID NO: 179975 - DNA, 17 bp, synthetic construct
  source 1..17: mol_type = other DNA
gaggccgaggggtctgg

SEQ ID NO: 179976 - DNA, 17 bp, synthetic construct
  source 1..17: mol_type = other DNA
agaggccgaggggtctg

SEQ ID NO: 179977 - DNA, 17 bp, synthetic construct
  source 1..17: mol_type = other DNA
gagaggccgaggggtct

SEQ ID NO: 179978 - DNA, 17 bp, synthetic construct
  source 1..17: mol_type = other DNA
agagaggccgaggggtc

SEQ ID NO: 179979 - DNA, 17 bp, synthetic construct
  source 1..17: mol_type = other DNA
cagagaggccgaggggt

SEQ ID NO: 179980 - DNA, 17 bp, synthetic construct
  source 1..17: mol_type = other DNA
tcagagaggccgagggg

SEQ ID NO: 179981 - DNA, 17 bp, synthetic construct
  source 1..17: mol_type = other DNA
ctcagagaggccgaggg

SEQ ID NO: 179982 - DNA, 17 bp, synthetic construct
  source 1..17: mol_type = other DNA
actcagagaggccgagg

SEQ ID NO: 179983 - DNA, 17 bp, synthetic construct
  source 1..17: mol_type = other DNA
cactcagagaggccgag

SEQ ID NO: 179984 - DNA, 17 bp, synthetic construct
  source 1..17: mol_type = other DNA
acactcagagaggccga

SEQ ID NO: 179985 - DNA, 17 bp, synthetic construct
  source 1..17: mol_type = other DNA
gacactcagagaggccg

SEQ ID NO: 179986 - DNA, 17 bp, synthetic construct
  source 1..17: mol_type = other DNA
ggacactcagagaggcc

SEQ ID NO: 179987 - DNA, 17 bp, synthetic construct
  source 1..17: mol_type = other DNA
aggacactcagagaggc

SEQ ID NO: 179988 - DNA, 17 bp, synthetic construct
  source 1..17: mol_type = other DNA
caggacactcagagagg

SEQ ID NO: 179989 - DNA, 17 bp, synthetic construct
  source 1..17: mol_type = other DNA
acaggacactcagagag

SEQ ID NO: 179990 - DNA, 17 bp, synthetic construct
  source 1..17: mol_type = other DNA
cacaggacactcagaga

SEQ ID NO: 179991 - DNA, 17 bp, synthetic construct
  source 1..17: mol_type = other DNA
gcacaggacactcagag

SEQ ID NO: 179992 - DNA, 17 bp, synthetic construct
  source 1..17: mol_type = other DNA
cgcacaggacactcaga

SEQ ID NO: 179993 - DNA, 17 bp, synthetic construct
  source 1..17: mol_type = other DNA
ccgcacaggacactcag

SEQ ID NO: 179994 - DNA, 17 bp, synthetic construct
  source 1..17: mol_type = other DNA
accgcacaggacactca

SEQ ID NO: 179995 - DNA, 17 bp, synthetic construct
  source 1..17: mol_type = other DNA
caccgcacaggacactc

SEQ ID NO: 179996 - DNA, 17 bp, synthetic construct
  source 1..17: mol_type = other DNA
tcaccgcacaggacact

SEQ ID NO: 179997 - DNA, 17 bp, synthetic construct
  source 1..17: mol_type = other DNA
ctcaccgcacaggacac

SEQ ID NO: 179998 - DNA, 17 bp, synthetic construct
  source 1..17: mol_type = other DNA
actcaccgcacaggaca

SEQ ID NO: 179999 - DNA, 17 bp, synthetic construct
  source 1..17: mol_type = other DNA
cactcaccgcacaggac

SEQ ID NO: 180000 - DNA, 17 bp, synthetic construct
  source 1..17: mol_type = other DNA
ccactcaccgcacagga

SEQ ID NO: 180001 - DNA, 17 bp, synthetic construct
  source 1..17: mol_type = other DNA
cccactcaccgcacagg

SEQ ID NO: 180002 - DNA, 17 bp, synthetic construct
  source 1..17: mol_type = other DNA
ccccactcaccgcacag

SEQ ID NO: 180003 - DNA, 17 bp, synthetic construct
  source 1..17: mol_type = other DNA
cccccactcaccgcaca

SEQ ID NO: 180004 - DNA, 17 bp, synthetic construct
  source 1..17: mol_type = other DNA
gcccccactcaccgcac

SEQ ID NO: 180005 - DNA, 17 bp, synthetic construct
  source 1..17: mol_type = other DNA
cgcccccactcaccgca

SEQ ID NO: 180006 - DNA, 17 bp, synthetic construct
  source 1..17: mol_type = other DNA
ccgcccccactcaccgc

SEQ ID NO: 180007 - DNA, 17 bp, synthetic construct
  source 1..17: mol_type = other DNA
gccgcccccactcaccg

SEQ ID NO: 180008 - DNA, 17 bp, synthetic construct
  source 1..17: mol_type = other DNA
ggccgcccccactcacc

SEQ ID NO: 180009 - DNA, 17 bp, synthetic construct
  source 1..17: mol_type = other DNA
gggccgcccccactcac

SEQ ID NO: 180010 - DNA, 17 bp, synthetic construct
  source 1..17: mol_type = other DNA
ggggccgcccccactca

SEQ ID NO: 180011 - DNA, 17 bp, synthetic construct
  source 1..17: mol_type = other DNA
cggggccgcccccactc

SEQ ID NO: 180012 - DNA, 17 bp, synthetic construct
  source 1..17: mol_type = other DNA
ccggggccgcccccact

SEQ ID NO: 180013 - DNA, 17 bp, synthetic construct
  source 1..17: mol_type = other DNA
cccggggccgcccccac

SEQ ID NO: 180014 - DNA, 17 bp, synthetic construct
  source 1..17: mol_type = other DNA
gcccggggccgccccca

SEQ ID NO: 180015 - DNA, 17 bp, synthetic construct
  source 1..17: mol_type = other DNA
ggcccggggccgccccc

SEQ ID NO: 180016 - DNA, 17 bp, synthetic construct
  source 1..17: mol_type = other DNA
gggcccggggccgcccc

SEQ ID NO: 180017 - DNA, 17 bp, synthetic construct
  source 1..17: mol_type = other DNA
ggggcccggggccgccc

SEQ ID NO: 180018 - DNA, 17 bp, synthetic construct
  source 1..17: mol_type = other DNA
gggggcccggggccgcc

SEQ ID NO: 180019 - DNA, 17 bp, synthetic construct
  source 1..17: mol_type = other DNA
ggggggcccggggccgc

SEQ ID NO: 180020 - DNA, 17 bp, synthetic construct
  source 1..17: mol_type = other DNA
tggggggcccggggccg

SEQ ID NO: 180021 - DNA, 17 bp, synthetic construct
  source 1..17: mol_type = other DNA
ctggggggcccggggcc

SEQ ID NO: 180022 - DNA, 17 bp, synthetic construct
  source 1..17: mol_type = other DNA
tctggggggcccggggc

SEQ ID NO: 180023 - DNA, 17 bp, synthetic construct
  source 1..17: mol_type = other DNA
gtctggggggcccgggg

SEQ ID NO: 180024 - DNA, 17 bp, synthetic construct
  source 1..17: mol_type = other DNA
ggtctggggggcccggg

SEQ ID NO: 180025 - DNA, 17 bp, synthetic construct
  source 1..17: mol_type = other DNA
gggtctggggggcccgg

SEQ ID NO: 180026 - DNA, 17 bp, synthetic construct
  source 1..17: mol_type = other DNA
ggggtctggggggcccg

SEQ ID NO: 180027 - DNA, 17 bp, synthetic construct
  source 1..17: mol_type = other DNA
aggggtctggggggccc

SEQ ID NO: 180028 - DNA, 17 bp, synthetic construct
  source 1..17: mol_type = other DNA
gaggggtctggggggcc

SEQ ID NO: 180029 - DNA, 17 bp, synthetic construct
  source 1..17: mol_type = other DNA
cgaggggtctggggggc

SEQ ID NO: 180030 - DNA, 17 bp, synthetic construct
  source 1..17: mol_type = other DNA
ccgaggggtctgggggg

SEQ ID NO: 180031 - DNA, 17 bp, synthetic construct
  source 1..17: mol_type = other DNA
gccgaggggtctggggg

SEQ ID NO: 180032 - DNA, 17 bp, synthetic construct
  source 1..17: mol_type = other DNA
ggccgaggggtctgggg

SEQ ID NO: 180033 - DNA, 17 bp, synthetic construct
  source 1..17: mol_type = other DNA
aggccgaggggtctggg

SEQ ID NO: 180034 - DNA, 17 bp, synthetic construct
  source 1..17: mol_type = other DNA
gaggccgaggggtctgg

SEQ ID NO: 180035 - DNA, 17 bp, synthetic construct
  source 1..17: mol_type = other DNA
agaggccgaggggtctg

SEQ ID NO: 180036 - DNA, 17 bp, synthetic construct
  source 1..17: mol_type = other DNA
gagaggccgaggggtct

SEQ ID NO: 180037 - DNA, 17 bp, synthetic construct
  source 1..17: mol_type = other DNA
agagaggccgaggggtc

SEQ ID NO: 180038 - DNA, 17 bp, synthetic construct
  source 1..17: mol_type = other DNA
cagagaggccgaggggt

SEQ ID NO: 180039 - DNA, 17 bp, synthetic construct
  source 1..17: mol_type = other DNA
tcagagaggccgagggg

SEQ ID NO: 180040 - DNA, 17 bp, synthetic construct
  source 1..17: mol_type = other DNA
ctcagagaggccgaggg

SEQ ID NO: 180041 - DNA, 17 bp, synthetic construct
  source 1..17: mol_type = other DNA
actcagagaggccgagg

SEQ ID NO: 180042 - DNA, 17 bp, synthetic construct
  source 1..17: mol_type = other DNA
cactcagagaggccgag

SEQ ID NO: 180043 - DNA, 17 bp, synthetic construct
  source 1..17: mol_type = other DNA
acactcagagaggccga

SEQ ID NO: 180044 - DNA, 17 bp, synthetic construct
  source 1..17: mol_type = other DNA
gacactcagagaggccg

SEQ ID NO: 180045 - DNA, 17 bp, synthetic construct
  source 1..17: mol_type = other DNA
ggacactcagagaggcc

SEQ ID NO: 180046 - DNA, 17 bp, synthetic construct
  source 1..17: mol_type = other DNA
aggacactcagagaggc

SEQ ID NO: 180047 - DNA, 17 bp, synthetic construct
  source 1..17: mol_type = other DNA
caggacactcagagagg

SEQ ID NO: 180048 - DNA, 17 bp, synthetic construct
  source 1..17: mol_type = other DNA
acaggacactcagagag

SEQ ID NO: 180049 - DNA, 17 bp, synthetic construct
  source 1..17: mol_type = other DNA
cacaggacactcagaga

SEQ ID NO: 180050 - DNA, 17 bp, synthetic construct
  source 1..17: mol_type = other DNA
gcacaggacactcagag

SEQ ID NO: 180051 - DNA, 17 bp, synthetic construct
  source 1..17: mol_type = other DNA
cgcacaggacactcaga

SEQ ID NO: 180052 - DNA, 17 bp, synthetic construct
  source 1..17: mol_type = other DNA
ccgcacaggacactcag

SEQ ID NO: 180053 - DNA, 17 bp, synthetic construct
  source 1..17: mol_type = other DNA
accgcacaggacactca

SEQ ID NO: 180054 - DNA, 17 bp, synthetic construct
  source 1..17: mol_type = other DNA
caccgcacaggacactc

SEQ ID NO: 180055 - DNA, 17 bp, synthetic construct
  source 1..17: mol_type = other DNA
tcaccgcacaggacact

SEQ ID NO: 180056 - DNA, 17 bp, synthetic construct
  source 1..17: mol_type = other DNA
ctcaccgcacaggacac

SEQ ID NO: 180057 - DNA, 17 bp, synthetic construct
  source 1..17: mol_type = other DNA
actcaccgcacaggaca

SEQ ID NO: 180058 - DNA, 17 bp, synthetic construct
  source 1..17: mol_type = other DNA
cactcaccgcacaggac

SEQ ID NO: 180059 - DNA, 17 bp, synthetic construct
  source 1..17: mol_type = other DNA
ccactcaccgcacagga

SEQ ID NO: 180060 - DNA, 17 bp, synthetic construct
  source 1..17: mol_type = other DNA
cccactcaccgcacagg

SEQ ID NO: 180061 - DNA, 17 bp, synthetic construct
  source 1..17: mol_type = other DNA
ccccactcaccgcacag

SEQ ID NO: 180062 - DNA, 17 bp, synthetic construct
  source 1..17: mol_type = other DNA
cccccactcaccgcaca

SEQ ID NO: 180063 - DNA, 17 bp, synthetic construct
  source 1..17: mol_type = other DNA
gcccccactcaccgcac

SEQ ID NO: 180064 - DNA, 17 bp, synthetic construct
  source 1..17: mol_type = other DNA
cgcccccactcaccgca

SEQ ID NO: 180065 - DNA, 17 bp, synthetic construct
  source 1..17: mol_type = other DNA
ccgcccccactcaccgc

SEQ ID NO: 180066 - DNA, 17 bp, synthetic construct
  source 1..17: mol_type = other DNA
gccgcccccactcaccg

SEQ ID NO: 180067 - DNA, 17 bp, synthetic construct
  source 1..17: mol_type = other DNA
ggccgcccccactcacc

SEQ ID NO: 180068 - DNA, 17 bp, synthetic construct
  source 1..17: mol_type = other DNA
gggccgcccccactcac

SEQ ID NO: 180069 - DNA, 17 bp, synthetic construct
  source 1..17: mol_type = other DNA
ggggccgcccccactca

SEQ ID NO: 180070 - DNA, 17 bp, synthetic construct
  source 1..17: mol_type = other DNA
cggggccgcccccactc

SEQ ID NO: 180071 - DNA, 17 bp, synthetic construct
  source 1..17: mol_type = other DNA
ccggggccgcccccact

SEQ ID NO: 180072 - DNA, 17 bp, synthetic construct
  source 1..17: mol_type = other DNA
cccggggccgcccccac

SEQ ID NO: 180073 - DNA, 17 bp, synthetic construct
  source 1..17: mol_type = other DNA
gcccggggccgccccca

SEQ ID NO: 180074 - DNA, 17 bp, synthetic construct
  source 1..17: mol_type = other DNA
ggcccggggccgccccc

SEQ ID NO: 180075 - DNA, 17 bp, synthetic construct
  source 1..17: mol_type = other DNA
gggcccggggccgcccc

SEQ ID NO: 180076 - DNA, 17 bp, synthetic construct
  source 1..17: mol_type = other DNA
ggggcccggggccgccc

SEQ ID NO: 180077 - DNA, 17 bp, synthetic construct
  source 1..17: mol_type = other DNA
gggggcccggggccgcc

SEQ ID NO: 180078 - DNA, 17 bp, synthetic construct
  source 1..17: mol_type = other DNA
ggggggcccggggccgc

SEQ ID NO: 180079 - DNA, 17 bp, synthetic construct
  source 1..17: mol_type = other DNA
tggggggcccggggccg

SEQ ID NO: 180080 - DNA, 17 bp, synthetic construct
  source 1..17: mol_type = other DNA
ctggggggcccggggcc

SEQ ID NO: 180081 - DNA, 17 bp, synthetic construct
  source 1..17: mol_type = other DNA
tctggggggcccggggc

SEQ ID NO: 180082 - DNA, 17 bp, synthetic construct
  source 1..17: mol_type = other DNA
gtctggggggcccgggg

SEQ ID NO: 180083 - DNA, 17 bp, synthetic construct
  source 1..17: mol_type = other DNA
ggtctggggggcccggg

SEQ ID NO: 180084 - DNA, 17 bp, synthetic construct
  source 1..17: mol_type = other DNA
gggtctggggggcccgg

SEQ ID NO: 180085 - DNA, 17 bp, synthetic construct
  source 1..17: mol_type = other DNA
ggggtctggggggcccg

SEQ ID NO: 180086 - DNA, 17 bp, synthetic construct
  source 1..17: mol_type = other DNA
aggggtctggggggccc

SEQ ID NO: 180087 - DNA, 17 bp, synthetic construct
  source 1..17: mol_type = other DNA
gaggggtctggggggcc

SEQ ID NO: 180088 - DNA, 17 bp, synthetic construct
  source 1..17: mol_type = other DNA
cgaggggtctggggggc

SEQ ID NO: 180089 - DNA, 17 bp, synthetic construct
  source 1..17: mol_type = other DNA
ccgaggggtctgggggg

SEQ ID NO: 180090 - DNA, 17 bp, synthetic construct
  source 1..17: mol_type = other DNA
gccgaggggtctggggg

SEQ ID NO: 180091 - DNA, 17 bp, synthetic construct
  source 1..17: mol_type = other DNA
ggccgaggggtctgggg

SEQ ID NO: 180092 - DNA, 17 bp, synthetic construct
  source 1..17: mol_type = other DNA
aggccgaggggtctggg

SEQ ID NO: 180093 - DNA, 17 bp, synthetic construct
  source 1..17: mol_type = other DNA
gaggccgaggggtctgg

SEQ ID NO: 180094 - DNA, 17 bp, synthetic construct
  source 1..17: mol_type = other DNA
agaggccgaggggtctg

SEQ ID NO: 180095 - DNA, 17 bp, synthetic construct
  source 1..17: mol_type = other DNA
gagaggccgaggggtct

SEQ ID NO: 180096 - DNA, 17 bp, synthetic construct
  source 1..17: mol_type = other DNA
agagaggccgaggggtc

SEQ ID NO: 180097 - DNA, 17 bp, synthetic construct
  source 1..17: mol_type = other DNA
cagagaggccgaggggt

SEQ ID NO: 180098 - DNA, 17 bp, synthetic construct
  source 1..17: mol_type = other DNA
tcagagaggccgagggg

SEQ ID NO: 180099 - DNA, 17 bp, synthetic construct
  source 1..17: mol_type = other DNA
ctcagagaggccgaggg

SEQ ID NO: 180100 - DNA, 17 bp, synthetic construct
  source 1..17: mol_type = other DNA
actcagagaggccgagg

SEQ ID NO: 180101 - DNA, 17 bp, synthetic construct
  source 1..17: mol_type = other DNA
cactcagagaggccgag

SEQ ID NO: 180102 - DNA, 17 bp, synthetic construct
  source 1..17: mol_type = other DNA
acactcagagaggccga

SEQ ID NO: 180103 - DNA, 17 bp, synthetic construct
  source 1..17: mol_type = other DNA
gacactcagagaggccg

SEQ ID NO: 180104 - DNA, 17 bp, synthetic construct
  source 1..17: mol_type = other DNA
ggacactcagagaggcc

SEQ ID NO: 180105 - DNA, 17 bp, synthetic construct
  source 1..17: mol_type = other DNA
aggacactcagagaggc

SEQ ID NO: 180106 - DNA, 17 bp, synthetic construct
  source 1..17: mol_type = other DNA
caggacactcagagagg

SEQ ID NO: 180107 - DNA, 17 bp, synthetic construct
  source 1..17: mol_type = other DNA
acaggacactcagagag

SEQ ID NO: 180108 - DNA, 17 bp, synthetic construct
  source 1..17: mol_type = other DNA
cacaggacactcagaga

SEQ ID NO: 180109 - DNA, 17 bp, synthetic construct
  source 1..17: mol_type = other DNA
gcacaggacactcagag

SEQ ID NO: 180110 - DNA, 17 bp, synthetic construct
  source 1..17: mol_type = other DNA
cgcacaggacactcaga

SEQ ID NO: 180111 - DNA, 17 bp, synthetic construct
  source 1..17: mol_type = other DNA
ccgcacaggacactcag

SEQ ID NO: 180112 - DNA, 17 bp, synthetic construct
  source 1..17: mol_type = other DNA
accgcacaggacactca

SEQ ID NO: 180113 - DNA, 17 bp, synthetic construct
  source 1..17: mol_type = other DNA
caccgcacaggacactc

SEQ ID NO: 180114 - DNA, 17 bp, synthetic construct
  source 1..17: mol_type = other DNA
tcaccgcacaggacact

SEQ ID NO: 180115 - DNA, 17 bp, synthetic construct
  source 1..17: mol_type = other DNA
ctcaccgcacaggacac

SEQ ID NO: 180116 - DNA, 17 bp, synthetic construct
  source 1..17: mol_type = other DNA
actcaccgcacaggaca

SEQ ID NO: 180117 - DNA, 17 bp, synthetic construct
  source 1..17: mol_type = other DNA
cactcaccgcacaggac

SEQ ID NO: 180118 - DNA, 17 bp, synthetic construct
  source 1..17: mol_type = other DNA
ccactcaccgcacagga

SEQ ID NO: 180119 - DNA, 17 bp, synthetic construct
  source 1..17: mol_type = other DNA
cccactcaccgcacagg

SEQ ID NO: 180120 - DNA, 17 bp, synthetic construct
  source 1..17: mol_type = other DNA
ccccactcaccgcacag

SEQ ID NO: 180121 - DNA, 17 bp, synthetic construct
  source 1..17: mol_type = other DNA
cccccactcaccgcaca

SEQ ID NO: 180122 - DNA, 17 bp, synthetic construct
  source 1..17: mol_type = other DNA
gcccccactcaccgcac

SEQ ID NO: 180123 - DNA, 17 bp, synthetic construct
  source 1..17: mol_type = other DNA
cgcccccactcaccgca

SEQ ID NO: 180124 - DNA, 17 bp, synthetic construct
  source 1..17: mol_type = other DNA
ccgcccccactcaccgc

SEQ ID NO: 180125 - DNA, 17 bp, synthetic construct
  source 1..17: mol_type = other DNA
gccgcccccactcaccg

SEQ ID NO: 180126 - DNA, 17 bp, synthetic construct
  source 1..17: mol_type = other DNA
ggccgcccccactcacc

SEQ ID NO: 180127 - DNA, 17 bp, synthetic construct
  source 1..17: mol_type = other DNA
gggccgcccccactcac

SEQ ID NO: 180128 - DNA, 17 bp, synthetic construct
  source 1..17: mol_type = other DNA
ggggccgcccccactca

SEQ ID NO: 180129 - DNA, 17 bp, synthetic construct
  source 1..17: mol_type = other DNA
cggggccgcccccactc

SEQ ID NO: 180130 - DNA, 17 bp, synthetic construct
  source 1..17: mol_type = other DNA
ccggggccgcccccact

SEQ ID NO: 180131 - DNA, 17 bp, synthetic construct
  source 1..17: mol_type = other DNA
cccggggccgcccccac

SEQ ID NO: 180132 - DNA, 17 bp, synthetic construct
  source 1..17: mol_type = other DNA
gcccggggccgccccca

SEQ ID NO: 180133 - DNA, 17 bp, synthetic construct
  source 1..17: mol_type = other DNA
ggcccggggccgccccc

SEQ ID NO: 180134 - DNA, 17 bp, synthetic construct
  source 1..17: mol_type = other DNA
gggcccggggccgcccc

SEQ ID NO: 180135 - DNA, 17 bp, synthetic construct
  source 1..17: mol_type = other DNA
ggggcccggggccgccc

SEQ ID NO: 180136 - DNA, 17 bp, synthetic construct
  source 1..17: mol_type = other DNA
gggggcccggggccgcc

SEQ ID NO: 180137 - DNA, 17 bp, synthetic construct
  source 1..17: mol_type = other DNA
ggggggcccggggccgc

SEQ ID NO: 180138 - DNA, 17 bp, synthetic construct
  source 1..17: mol_type = other DNA
tggggggcccggggccg

SEQ ID NO: 180139 - DNA, 17 bp, synthetic construct
  source 1..17: mol_type = other DNA
ctggggggcccggggcc

SEQ ID NO: 180140 - DNA, 17 bp, synthetic construct
  source 1..17: mol_type = other DNA
tctggggggcccggggc

SEQ ID NO: 180141 - DNA, 17 bp, synthetic construct
  source 1..17: mol_type = other DNA
gtctggggggcccgggg

SEQ ID NO: 180142 - DNA, 17 bp, synthetic construct
  source 1..17: mol_type = other DNA
ggtctggggggcccggg

SEQ ID NO: 180143 - DNA, 17 bp, synthetic construct
  source 1..17: mol_type = other DNA
gggtctggggggcccgg

SEQ ID NO: 180144 - DNA, 17 bp, synthetic construct
  source 1..17: mol_type = other DNA
ggggtctggggggcccg

SEQ ID NO: 180145 - DNA, 17 bp, synthetic construct
  source 1..17: mol_type = other DNA
aggggtctggggggccc

SEQ ID NO: 180146 - DNA, 17 bp, synthetic construct
  source 1..17: mol_type = other DNA
gaggggtctggggggcc

SEQ ID NO: 180147 - DNA, 17 bp, synthetic construct
  source 1..17: mol_type = other DNA
cgaggggtctggggggc

SEQ ID NO: 180148 - DNA, 17 bp, synthetic construct
  source 1..17: mol_type = other DNA
ccgaggggtctgggggg

SEQ ID NO: 180149 - DNA, 17 bp, synthetic construct
  source 1..17: mol_type = other DNA
gccgaggggtctggggg

SEQ ID NO: 180150 - DNA, 17 bp, synthetic construct
  source 1..17: mol_type = other DNA
ggccgaggggtctgggg

SEQ ID NO: 180151 - DNA, 17 bp, synthetic construct
  source 1..17: mol_type = other DNA
aggccgaggggtctggg

SEQ ID NO: 180152 - DNA, 17 bp, synthetic construct
  source 1..17: mol_type = other DNA
gaggccgaggggtctgg

SEQ ID NO: 180153 - DNA, 17 bp, synthetic construct
  source 1..17: mol_type = other DNA
agaggccgaggggtctg

SEQ ID NO: 180154 - DNA, 17 bp, synthetic construct
  source 1..17: mol_type = other DNA
gagaggccgaggggtct

SEQ ID NO: 180155 - DNA, 17 bp, synthetic construct
  source 1..17: mol_type = other DNA
agagaggccgaggggtc

SEQ ID NO: 180156 - DNA, 17 bp, synthetic construct
  source 1..17: mol_type = other DNA
cagagaggccgaggggt

SEQ ID NO: 180157 - DNA, 17 bp, synthetic construct
  source 1..17: mol_type = other DNA
tcagagaggccgagggg

SEQ ID NO: 180158 - DNA, 17 bp, synthetic construct
  source 1..17: mol_type = other DNA
ctcagagaggccgaggg

SEQ ID NO: 180159 - DNA, 17 bp, synthetic construct
  source 1..17: mol_type = other DNA
actcagagaggccgagg

SEQ ID NO: 180160 - DNA, 17 bp, synthetic construct
  source 1..17: mol_type = other DNA
cactcagagaggccgag

SEQ ID NO: 180161 - DNA, 17 bp, synthetic construct
  source 1..17: mol_type = other DNA
acactcagagaggccga

SEQ ID NO: 180162 - DNA, 17 bp, synthetic construct
  source 1..17: mol_type = other DNA
gacactcagagaggccg

SEQ ID NO: 180163 - DNA, 17 bp, synthetic construct
  source 1..17: mol_type = other DNA
ggacactcagagaggcc

SEQ ID NO: 180164 - DNA, 17 bp, synthetic construct
  source 1..17: mol_type = other DNA
aggacactcagagaggc

SEQ ID NO: 180165 - DNA, 17 bp, synthetic construct
  source 1..17: mol_type = other DNA
caggacactcagagagg

SEQ ID NO: 180166 - DNA, 17 bp, synthetic construct
  source 1..17: mol_type = other DNA
acaggacactcagagag

SEQ ID NO: 180167 - DNA, 17 bp, synthetic construct
  source 1..17: mol_type = other DNA
cacaggacactcagaga

SEQ ID NO: 180168 - DNA, 17 bp, synthetic construct
  source 1..17: mol_type = other DNA
gcacaggacactcagag

SEQ ID NO: 180169 - DNA, 17 bp, synthetic construct
  source 1..17: mol_type = other DNA
cgcacaggacactcaga

SEQ ID NO: 180170 - DNA, 17 bp, synthetic construct
  source 1..17: mol_type = other DNA
ccgcacaggacactcag

SEQ ID NO: 180171 - DNA, 17 bp, synthetic construct
  source 1..17: mol_type = other DNA
accgcacaggacactca

SEQ ID NO: 180172 - DNA, 17 bp, synthetic construct
  source 1..17: mol_type = other DNA
caccgcacaggacactc

SEQ ID NO: 180173 - DNA, 17 bp, synthetic construct
  source 1..17: mol_type = other DNA
tcaccgcacaggacact

SEQ ID NO: 180174 - DNA, 17 bp, synthetic construct
  source 1..17: mol_type = other DNA
ctcaccgcacaggacac

SEQ ID NO: 180175 - DNA, 17 bp, synthetic construct
  source 1..17: mol_type = other DNA
actcaccgcacaggaca

SEQ ID NO: 180176 - DNA, 17 bp, synthetic construct
  source 1..17: mol_type = other DNA
cactcaccgcacaggac

SEQ ID NO: 180177 - DNA, 17 bp, synthetic construct
  source 1..17: mol_type = other DNA
ccactcaccgcacagga

SEQ ID NO: 180178 - DNA, 17 bp, synthetic construct
  source 1..17: mol_type = other DNA
cccactcaccgcacagg

SEQ ID NO: 180179 - DNA, 17 bp, synthetic construct
  source 1..17: mol_type = other DNA
ccccactcaccgcacag

SEQ ID NO: 180180 - DNA, 17 bp, synthetic construct
  source 1..17: mol_type = other DNA
cccccactcaccgcaca

SEQ ID NO: 180181 - DNA, 17 bp, synthetic construct
  source 1..17: mol_type = other DNA
gcccccactcaccgcac

SEQ ID NO: 180182 - DNA, 17 bp, synthetic construct
  source 1..17: mol_type = other DNA
cgcccccactcaccgca

SEQ ID NO: 180183 - DNA, 17 bp, synthetic construct
  source 1..17: mol_type = other DNA
ccgcccccactcaccgc

SEQ ID NO: 180184 - DNA, 17 bp, synthetic construct
  source 1..17: mol_type = other DNA
gccgcccccactcaccg

SEQ ID NO: 180185 - DNA, 17 bp, synthetic construct
  source 1..17: mol_type = other DNA
ggccgcccccactcacc

SEQ ID NO: 180186 - DNA, 17 bp, synthetic construct
  source 1..17: mol_type = other DNA
gggccgcccccactcac

SEQ ID NO: 180187 - DNA, 17 bp, synthetic construct
  source 1..17: mol_type = other DNA
ggggccgcccccactca

SEQ ID NO: 180188 - DNA, 17 bp, synthetic construct
  source 1..17: mol_type = other DNA
cggggccgcccccactc

SEQ ID NO: 180189 - DNA, 17 bp, synthetic construct
  source 1..17: mol_type = other DNA
ccggggccgcccccact

SEQ ID NO: 180190 - DNA, 17 bp, synthetic construct
  source 1..17: mol_type = other DNA
cccggggccgcccccac

SEQ ID NO: 180191 - DNA, 17 bp, synthetic construct
  source 1..17: mol_type = other DNA
gcccggggccgccccca

SEQ ID NO: 180192 - DNA, 17 bp, synthetic construct
  source 1..17: mol_type = other DNA
ggcccggggccgccccc

SEQ ID NO: 180193 - DNA, 17 bp, synthetic construct
  source 1..17: mol_type = other DNA
gggcccggggccgcccc

SEQ ID NO: 180194 - DNA, 17 bp, synthetic construct
  source 1..17: mol_type = other DNA
ggggcccggggccgccc

SEQ ID NO: 180195 - DNA, 17 bp, synthetic construct
  source 1..17: mol_type = other DNA
gggggcccggggccgcc

SEQ ID NO: 180196 - DNA, 17 bp, synthetic construct
  source 1..17: mol_type = other DNA
ggggggcccggggccgc

SEQ ID NO: 180197 - DNA, 17 bp, synthetic construct
  source 1..17: mol_type = other DNA
tggggggcccggggccg

SEQ ID NO: 180198 - DNA, 17 bp, synthetic construct
  source 1..17: mol_type = other DNA
ctggggggcccggggcc

SEQ ID NO: 180199 - DNA, 17 bp, synthetic construct
  source 1..17: mol_type = other DNA
tctggggggcccggggc

SEQ ID NO: 180200 - DNA, 17 bp, synthetic construct
  source 1..17: mol_type = other DNA
gtctggggggcccgggg

SEQ ID NO: 180201 - DNA, 17 bp, synthetic construct
  source 1..17: mol_type = other DNA
ggtctggggggcccggg

SEQ ID NO: 180202 - DNA, 17 bp, synthetic construct
  source 1..17: mol_type = other DNA
gggtctggggggcccgg

SEQ ID NO: 180203 - DNA, 17 bp, synthetic construct
  source 1..17: mol_type = other DNA
ggggtctggggggcccg

SEQ ID NO: 180204 - DNA, 17 bp, synthetic construct
  source 1..17: mol_type = other DNA
aggggtctggggggccc

SEQ ID NO: 180205 - DNA, 17 bp, synthetic construct
  source 1..17: mol_type = other DNA
gaggggtctggggggcc

SEQ ID NO: 180206 - DNA, 17 bp, synthetic construct
  source 1..17: mol_type = other DNA
cgaggggtctggggggc

SEQ ID NO: 180207 - DNA, 17 bp, synthetic construct
  source 1..17: mol_type = other DNA
ccgaggggtctgggggg

SEQ ID NO: 180208 - DNA, 17 bp, synthetic construct
  source 1..17: mol_type = other DNA
gccgaggggtctggggg

SEQ ID NO: 180209 - DNA, 17 bp, synthetic construct
  source 1..17: mol_type = other DNA
ggccgaggggtctgggg

SEQ ID NO: 180210 - DNA, 17 bp, synthetic construct
  source 1..17: mol_type = other DNA
aggccgaggggtctggg

SEQ ID NO: 180211 - DNA, 17 bp, synthetic construct
  source 1..17: mol_type = other DNA
gaggccgaggggtctgg

SEQ ID NO: 180212 - DNA, 17 bp, synthetic construct
  source 1..17: mol_type = other DNA
agaggccgaggggtctg

SEQ ID NO: 180213 - DNA, 17 bp, synthetic construct
  source 1..17: mol_type = other DNA
gagaggccgaggggtct

SEQ ID NO: 180214 - DNA, 17 bp, synthetic construct
  source 1..17: mol_type = other DNA
agagaggccgaggggtc

SEQ ID NO: 180215 - DNA, 17 bp, synthetic construct
  source 1..17: mol_type = other DNA
cagagaggccgaggggt

SEQ ID NO: 180216 - DNA, 17 bp, synthetic construct
  source 1..17: mol_type = other DNA
tcagagaggccgagggg

SEQ ID NO: 180217 - DNA, 17 bp, synthetic construct
  source 1..17: mol_type = other DNA
ctcagagaggccgaggg

SEQ ID NO: 180218 - DNA, 17 bp, synthetic construct
  source 1..17: mol_type = other DNA
actcagagaggccgagg

SEQ ID NO: 180219 - DNA, 17 bp, synthetic construct
  source 1..17: mol_type = other DNA
cactcagagaggccgag

SEQ ID NO: 180220 - DNA, 17 bp, synthetic construct
  source 1..17: mol_type = other DNA
acactcagagaggccga

SEQ ID NO: 180221 - DNA, 17 bp, synthetic construct
  source 1..17: mol_type = other DNA
gacactcagagaggccg

SEQ ID NO: 180222 - DNA, 17 bp, synthetic construct
  source 1..17: mol_type = other DNA
ggacactcagagaggcc

SEQ ID NO: 180223 - DNA, 17 bp, synthetic construct
  source 1..17: mol_type = other DNA
aggacactcagagaggc

SEQ ID NO: 180224 - DNA, 17 bp, synthetic construct
  source 1..17: mol_type = other DNA
caggacactcagagagg

SEQ ID NO: 180225 - DNA, 17 bp, synthetic construct
  source 1..17: mol_type = other DNA
acaggacactcagagag

SEQ ID NO: 180226 - DNA, 17 bp, synthetic construct
  source 1..17: mol_type = other DNA
cacaggacactcagaga

SEQ ID NO: 180227 - DNA, 17 bp, synthetic construct
  source 1..17: mol_type = other DNA
gcacaggacactcagag

SEQ ID NO: 180228 - DNA, 17 bp, synthetic construct
  source 1..17: mol_type = other DNA
cgcacaggacactcaga

SEQ ID NO: 180229 - DNA, 17 bp, synthetic construct
  source 1..17: mol_type = other DNA
ccgcacaggacactcag

SEQ ID NO: 180230 - DNA, 17 bp, synthetic construct
  source 1..17: mol_type = other DNA
accgcacaggacactca

SEQ ID NO: 180231 - DNA, 17 bp, synthetic construct
  source 1..17: mol_type = other DNA
caccgcacaggacactc

SEQ ID NO: 180232 - DNA, 17 bp, synthetic construct
  source 1..17: mol_type = other DNA
tcaccgcacaggacact

SEQ ID NO: 180233 - DNA, 17 bp, synthetic construct
  source 1..17: mol_type = other DNA
ctcaccgcacaggacac

SEQ ID NO: 180234 - DNA, 17 bp, synthetic construct
  source 1..17: mol_type = other DNA
actcaccgcacaggaca

SEQ ID NO: 180235 - DNA, 17 bp, synthetic construct
  source 1..17: mol_type = other DNA
cactcaccgcacaggac

SEQ ID NO: 180236 - DNA, 17 bp, synthetic construct
  source 1..17: mol_type = other DNA
ccactcaccgcacagga

SEQ ID NO: 180237 - DNA, 17 bp, synthetic construct
  source 1..17: mol_type = other DNA
cccactcaccgcacagg

SEQ ID NO: 180238 - DNA, 17 bp, synthetic construct
  source 1..17: mol_type = other DNA
ccccactcaccgcacag

SEQ ID NO: 180239 - DNA, 17 bp, synthetic construct
  source 1..17: mol_type = other DNA
cccccactcaccgcaca

SEQ ID NO: 180240 - DNA, 17 bp, synthetic construct
  source 1..17: mol_type = other DNA
gcccccactcaccgcac

SEQ ID NO: 180241 - DNA, 17 bp, synthetic construct
  source 1..17: mol_type = other DNA
cgcccccactcaccgca

SEQ ID NO: 180242 - DNA, 17 bp, synthetic construct
  source 1..17: mol_type = other DNA
ccgcccccactcaccgc

SEQ ID NO: 180243 - DNA, 17 bp, synthetic construct
  source 1..17: mol_type = other DNA
gccgcccccactcaccg

SEQ ID NO: 180244 - DNA, 17 bp, synthetic construct
  source 1..17: mol_type = other DNA
ggccgcccccactcacc

SEQ ID NO: 180245 - DNA, 17 bp, synthetic construct
  source 1..17: mol_type = other DNA
gggccgcccccactcac

SEQ ID NO: 180246 - DNA, 17 bp, synthetic construct
  source 1..17: mol_type = other DNA
ggggccgcccccactca

SEQ ID NO: 180247 - DNA, 17 bp, synthetic construct
  source 1..17: mol_type = other DNA
cggggccgcccccactc

SEQ ID NO: 180248 - DNA, 17 bp, synthetic construct
  source 1..17: mol_type = other DNA
ccggggccgcccccact

SEQ ID NO: 180249 - DNA, 17 bp, synthetic construct
  source 1..17: mol_type = other DNA
cccggggccgcccccac

SEQ ID NO: 180250 - DNA, 17 bp, synthetic construct
  source 1..17: mol_type = other DNA
gcccggggccgccccca

SEQ ID NO: 180251 - DNA, 17 bp, synthetic construct
  source 1..17: mol_type = other DNA
ggcccggggccgccccc

SEQ ID NO: 180252 - DNA, 17 bp, synthetic construct
  source 1..17: mol_type = other DNA
gggcccggggccgcccc

SEQ ID NO: 180253 - DNA, 17 bp, synthetic construct
  source 1..17: mol_type = other DNA
ggggcccggggccgccc

SEQ ID NO: 180254 - DNA, 17 bp, synthetic construct
  source 1..17: mol_type = other DNA
gggggcccggggccgcc

SEQ ID NO: 180255 - DNA, 17 bp, synthetic construct
  source 1..17: mol_type = other DNA
ggggggcccggggccgc

SEQ ID NO: 180256 - DNA, 17 bp, synthetic construct
  source 1..17: mol_type = other DNA
tggggggcccggggccg

SEQ ID NO: 180257 - DNA, 17 bp, synthetic construct
  source 1..17: mol_type = other DNA
ctggggggcccggggcc

SEQ ID NO: 180258 - DNA, 17 bp, synthetic construct
  source 1..17: mol_type = other DNA
tctggggggcccggggc

SEQ ID NO: 180259 - DNA, 17 bp, synthetic construct
  source 1..17: mol_type = other DNA
gtctggggggcccgggg

SEQ ID NO: 180260 - DNA, 17 bp, synthetic construct
  source 1..17: mol_type = other DNA
ggtctggggggcccggg

SEQ ID NO: 180261 - DNA, 17 bp, synthetic construct
  source 1..17: mol_type = other DNA
gggtctggggggcccgg

SEQ ID NO: 180262 - DNA, 17 bp, synthetic construct
  source 1..17: mol_type = other DNA
ggggtctggggggcccg

SEQ ID NO: 180263 - DNA, 17 bp, synthetic construct
  source 1..17: mol_type = other DNA
aggggtctggggggccc

SEQ ID NO: 180264 - DNA, 17 bp, synthetic construct
  source 1..17: mol_type = other DNA
gaggggtctggggggcc

SEQ ID NO: 180265 - DNA, 17 bp, synthetic construct
  source 1..17: mol_type = other DNA
cgaggggtctggggggc

SEQ ID NO: 180266 - DNA, 17 bp, synthetic construct
  source 1..17: mol_type = other DNA
ccgaggggtctgggggg

SEQ ID NO: 180267 - DNA, 17 bp, synthetic construct
  source 1..17: mol_type = other DNA
gccgaggggtctggggg

SEQ ID NO: 180268 - DNA, 17 bp, synthetic construct
  source 1..17: mol_type = other DNA
ggccgaggggtctgggg

SEQ ID NO: 180269 - DNA, 17 bp, synthetic construct
  source 1..17: mol_type = other DNA
aggccgaggggtctggg

SEQ ID NO: 180270 - DNA, 17 bp, synthetic construct
  source 1..17: mol_type = other DNA
gaggccgaggggtctgg

SEQ ID NO: 180271 - DNA, 17 bp, synthetic construct
  source 1..17: mol_type = other DNA
agaggccgaggggtctg

SEQ ID NO: 180272 - DNA, 17 bp, synthetic construct
  source 1..17: mol_type = other DNA
gagaggccgaggggtct

SEQ ID NO: 180273 - DNA, 17 bp, synthetic construct
  source 1..17: mol_type = other DNA
agagaggccgaggggtc

SEQ ID NO: 180274 - DNA, 17 bp, synthetic construct
  source 1..17: mol_type = other DNA
cagagaggccgaggggt

SEQ ID NO: 180275 - DNA, 17 bp, synthetic construct
  source 1..17: mol_type = other DNA
tcagagaggccgagggg

SEQ ID NO: 180276 - DNA, 17 bp, synthetic construct
  source 1..17: mol_type = other DNA
ctcagagaggccgaggg

SEQ ID NO: 180277 - DNA, 17 bp, synthetic construct
  source 1..17: mol_type = other DNA
actcagagaggccgagg

SEQ ID NO: 180278 - DNA, 17 bp, synthetic construct
  source 1..17: mol_type = other DNA
cactcagagaggccgag

SEQ ID NO: 180279 - DNA, 17 bp, synthetic construct
  source 1..17: mol_type = other DNA
acactcagagaggccga

SEQ ID NO: 180280 - DNA, 17 bp, synthetic construct
  source 1..17: mol_type = other DNA
gacactcagagaggccg

SEQ ID NO: 180281 - DNA, 17 bp, synthetic construct
  source 1..17: mol_type = other DNA
ggacactcagagaggcc

SEQ ID NO: 180282 - DNA, 17 bp, synthetic construct
  source 1..17: mol_type = other DNA
aggacactcagagaggc

SEQ ID NO: 180283 - DNA, 17 bp, synthetic construct
  source 1..17: mol_type = other DNA
caggacactcagagagg

SEQ ID NO: 180284 - DNA, 17 bp, synthetic construct
  source 1..17: mol_type = other DNA
acaggacactcagagag

SEQ ID NO: 180285 - DNA, 17 bp, synthetic construct
  source 1..17: mol_type = other DNA
cacaggacactcagaga

SEQ ID NO: 180286 - DNA, 17 bp, synthetic construct
  source 1..17: mol_type = other DNA
gcacaggacactcagag

SEQ ID NO: 180287 - DNA, 17 bp, synthetic construct
  source 1..17: mol_type = other DNA
cgcacaggacactcaga

SEQ ID NO: 180288 - DNA, 17 bp, synthetic construct
  source 1..17: mol_type = other DNA
ccgcacaggacactcag

SEQ ID NO: 180289 - DNA, 17 bp, synthetic construct
  source 1..17: mol_type = other DNA
accgcacaggacactca

SEQ ID NO: 180290 - DNA, 17 bp, synthetic construct
  source 1..17: mol_type = other DNA
caccgcacaggacactc

SEQ ID NO: 180291 - DNA, 17 bp, synthetic construct
  source 1..17: mol_type = other DNA
tcaccgcacaggacact

SEQ ID NO: 180292 - DNA, 17 bp, synthetic construct
  source 1..17: mol_type = other DNA
ctcaccgcacaggacac

SEQ ID NO: 180293 - DNA, 17 bp, synthetic construct
  source 1..17: mol_type = other DNA
actcaccgcacaggaca

SEQ ID NO: 180294 - DNA, 17 bp, synthetic construct
  source 1..17: mol_type = other DNA
cactcaccgcacaggac

SEQ ID NO: 180295 - DNA, 17 bp, synthetic construct
  source 1..17: mol_type = other DNA
ccactcaccgcacagga

SEQ ID NO: 180296 - DNA, 17 bp, synthetic construct
  source 1..17: mol_type = other DNA
cccactcaccgcacagg

SEQ ID NO: 180297 - DNA, 17 bp, synthetic construct
  source 1..17: mol_type = other DNA
ccccactcaccgcacag

SEQ ID NO: 180298 - DNA, 17 bp, synthetic construct
  source 1..17: mol_type = other DNA
cccccactcaccgcaca

SEQ ID NO: 180299 - DNA, 17 bp, synthetic construct
  source 1..17: mol_type = other DNA
gcccccactcaccgcac

SEQ ID NO: 180300 - DNA, 17 bp, synthetic construct
  source 1..17: mol_type = other DNA
cgcccccactcaccgca

SEQ ID NO: 180301 - DNA, 17 bp, synthetic construct
  source 1..17: mol_type = other DNA
ccgcccccactcaccgc

SEQ ID NO: 180302 - DNA, 17 bp, synthetic construct
  source 1..17: mol_type = other DNA
gccgcccccactcaccg

SEQ ID NO: 180303 - DNA, 17 bp, synthetic construct
  source 1..17: mol_type = other DNA
ggccgcccccactcacc

SEQ ID NO: 180304 - DNA, 17 bp, synthetic construct
  source 1..17: mol_type = other DNA
gggccgcccccactcac

SEQ ID NO: 180305 - DNA, 17 bp, synthetic construct
  source 1..17: mol_type = other DNA
ggggccgcccccactca

SEQ ID NO: 180306 - DNA, 17 bp, synthetic construct
  source 1..17: mol_type = other DNA
cggggccgcccccactc

SEQ ID NO: 180307 - DNA, 17 bp, synthetic construct
  source 1..17: mol_type = other DNA
ccggggccgcccccact

SEQ ID NO: 180308 - DNA, 17 bp, synthetic construct
  source 1..17: mol_type = other DNA
cccggggccgcccccac

SEQ ID NO: 180309 - DNA, 17 bp, synthetic construct
  source 1..17: mol_type = other DNA
gcccggggccgccccca

SEQ ID NO: 180310 - DNA, 17 bp, synthetic construct
  source 1..17: mol_type = other DNA
ggcccggggccgccccc

SEQ ID NO: 180311 - DNA, 17 bp, synthetic construct
  source 1..17: mol_type = other DNA
gggcccggggccgcccc

SEQ ID NO: 180312 - DNA, 17 bp, synthetic construct
  source 1..17: mol_type = other DNA
ggggcccggggccgccc

SEQ ID NO: 180313 - DNA, 17 bp, synthetic construct
  source 1..17: mol_type = other DNA
gggggcccggggccgcc

SEQ ID NO: 180314 - DNA, 17 bp, synthetic construct
  source 1..17: mol_type = other DNA
ggggggcccggggccgc

SEQ ID NO: 180315 - DNA, 17 bp, synthetic construct
  source 1..17: mol_type = other DNA
tggggggcccggggccg

SEQ ID NO: 180316 - DNA, 17 bp, synthetic construct
  source 1..17: mol_type = other DNA
ctggggggcccggggcc

SEQ ID NO: 180317 - DNA, 17 bp, synthetic construct
  source 1..17: mol_type = other DNA
tctggggggcccggggc

SEQ ID NO: 180318 - DNA, 17 bp, synthetic construct
  source 1..17: mol_type = other DNA
gtctggggggcccgggg

SEQ ID NO: 180319 - DNA, 17 bp, synthetic construct
  source 1..17: mol_type = other DNA
agtctggggggcccggg

SEQ ID NO: 180320 - DNA, 17 bp, synthetic construct
  source 1..17: mol_type = other DNA
gagtctggggggcccgg

SEQ ID NO: 180321 - DNA, 17 bp, synthetic construct
  source 1..17: mol_type = other DNA
ggagtctggggggcccg

SEQ ID NO: 180322 - DNA, 17 bp, synthetic construct
  source 1..17: mol_type = other DNA
aggagtctggggggccc

SEQ ID NO: 180323 - DNA, 17 bp, synthetic construct
  source 1..17: mol_type = other DNA
gaggagtctggggggcc

SEQ ID NO: 180324 - DNA, 17 bp, synthetic construct
  source 1..17: mol_type = other DNA
cgaggagtctggggggc

SEQ ID NO: 180325 - DNA, 17 bp, synthetic construct
  source 1..17: mol_type = other DNA
ccgaggagtctgggggg

SEQ ID NO: 180326 - DNA, 17 bp, synthetic construct
  source 1..17: mol_type = other DNA
gccgaggagtctggggg

SEQ ID NO: 180327 - DNA, 17 bp, synthetic construct
  source 1..17: mol_type = other DNA
ggccgaggagtctgggg

SEQ ID NO: 180328 - DNA, 17 bp, synthetic construct
  source 1..17: mol_type = other DNA
aggccgaggagtctggg

SEQ ID NO: 180329 - DNA, 17 bp, synthetic construct
  source 1..17: mol_type = other DNA
gaggccgaggagtctgg

SEQ ID NO: 180330 - DNA, 17 bp, synthetic construct
  source 1..17: mol_type = other DNA
agaggccgaggagtctg

SEQ ID NO: 180331 - DNA, 17 bp, synthetic construct
  source 1..17: mol_type = other DNA
gagaggccgaggagtct

SEQ ID NO: 180332 - DNA, 17 bp, synthetic construct
  source 1..17: mol_type = other DNA
agagaggccgaggagtc

SEQ ID NO: 180333 - DNA, 17 bp, synthetic construct
  source 1..17: mol_type = other DNA
cagagaggccgaggagt

SEQ ID NO: 180334 - DNA, 17 bp, synthetic construct
  source 1..17: mol_type = other DNA
tcagagaggccgaggag

SEQ ID NO: 180335 - DNA, 17 bp, synthetic construct
  source 1..17: mol_type = other DNA
ctcagagaggccgagga

SEQ ID NO: 180336 - DNA, 17 bp, synthetic construct
  source 1..17: mol_type = other DNA
actcagagaggccgagg

SEQ ID NO: 180337 - DNA, 17 bp, synthetic construct
  source 1..17: mol_type = other DNA
cactcagagaggccgag

SEQ ID NO: 180338 - DNA, 17 bp, synthetic construct
  source 1..17: mol_type = other DNA
acactcagagaggccga

SEQ ID NO: 180339 - DNA, 17 bp, synthetic construct
  source 1..17: mol_type = other DNA
gacactcagagaggccg

SEQ ID NO: 180340 - DNA, 17 bp, synthetic construct
  source 1..17: mol_type = other DNA
ggacactcagagaggcc

SEQ ID NO: 180341 - DNA, 17 bp, synthetic construct
  source 1..17: mol_type = other DNA
aggacactcagagaggc

SEQ ID NO: 180342 - DNA, 17 bp, synthetic construct
  source 1..17: mol_type = other DNA
caggacactcagagagg

SEQ ID NO: 180343 - DNA, 17 bp, synthetic construct
  source 1..17: mol_type = other DNA
acaggacactcagagag

SEQ ID NO: 180344 - DNA, 17 bp, synthetic construct
  source 1..17: mol_type = other DNA
cacaggacactcagaga

SEQ ID NO: 180345 - DNA, 17 bp, synthetic construct
  source 1..17: mol_type = other DNA
gcacaggacactcagag

SEQ ID NO: 180346 - DNA, 17 bp, synthetic construct
  source 1..17: mol_type = other DNA
cgcacaggacactcaga

SEQ ID NO: 180347 - DNA, 17 bp, synthetic construct
  source 1..17: mol_type = other DNA
ccgcacaggacactcag

SEQ ID NO: 180348 - DNA, 17 bp, synthetic construct
  source 1..17: mol_type = other DNA
accgcacaggacactca

SEQ ID NO: 180349 - DNA, 17 bp, synthetic construct
  source 1..17: mol_type = other DNA
caccgcacaggacactc

SEQ ID NO: 180350 - DNA, 17 bp, synthetic construct
  source 1..17: mol_type = other DNA
tcaccgcacaggacact

SEQ ID NO: 180351 - DNA, 17 bp, synthetic construct
  source 1..17: mol_type = other DNA
atcaccgcacaggacac

SEQ ID NO: 180352 - DNA, 17 bp, synthetic construct
  source 1..17: mol_type = other DNA
aatcaccgcacaggaca

SEQ ID NO: 180353 - DNA, 17 bp, synthetic construct
  source 1..17: mol_type = other DNA
caatcaccgcacaggac

SEQ ID NO: 180354 - DNA, 17 bp, synthetic construct
  source 1..17: mol_type = other DNA
ccaatcaccgcacagga

SEQ ID NO: 180355 - DNA, 17 bp, synthetic construct
  source 1..17: mol_type = other DNA
cccaatcaccgcacagg

SEQ ID NO: 180356 - DNA, 17 bp, synthetic construct
  source 1..17: mol_type = other DNA
ccccaatcaccgcacag

SEQ ID NO: 180357 - DNA, 17 bp, synthetic construct
  source 1..17: mol_type = other DNA
cccccaatcaccgcaca

SEQ ID NO: 180358 - DNA, 17 bp, synthetic construct
  source 1..17: mol_type = other DNA
gcccccaatcaccgcac

SEQ ID NO: 180359 - DNA, 17 bp, synthetic construct
  source 1..17: mol_type = other DNA
cgcccccaatcaccgca

SEQ ID NO: 180360 - DNA, 17 bp, synthetic construct
  source 1..17: mol_type = other DNA
ccgcccccaatcaccgc

SEQ ID NO: 180361 - DNA, 17 bp, synthetic construct
  source 1..17: mol_type = other DNA
gccgcccccaatcaccg

SEQ ID NO: 180362 - DNA, 17 bp, synthetic construct
  source 1..17: mol_type = other DNA
ggccgcccccaatcacc

SEQ ID NO: 180363 - DNA, 17 bp, synthetic construct
  source 1..17: mol_type = other DNA
gggccgcccccaatcac

SEQ ID NO: 180364 - DNA, 17 bp, synthetic construct
  source 1..17: mol_type = other DNA
agggccgcccccaatca

SEQ ID NO: 180365 - DNA, 17 bp, synthetic construct
  source 1..17: mol_type = other DNA
cagggccgcccccaatc

SEQ ID NO: 180366 - DNA, 17 bp, synthetic construct
  source 1..17: mol_type = other DNA
ccagggccgcccccaat

SEQ ID NO: 180367 - DNA, 17 bp, synthetic construct
  source 1..17: mol_type = other DNA
cccagggccgcccccaa

SEQ ID NO: 180368 - DNA, 17 bp, synthetic construct
  source 1..17: mol_type = other DNA
gcccagggccgccccca

SEQ ID NO: 180369 - DNA, 17 bp, synthetic construct
  source 1..17: mol_type = other DNA
ggcccagggccgccccc

SEQ ID NO: 180370 - DNA, 17 bp, synthetic construct
  source 1..17: mol_type = other DNA
gggcccagggccgcccc

SEQ ID NO: 180371 - DNA, 17 bp, synthetic construct
  source 1..17: mol_type = other DNA
ggggcccagggccgccc

SEQ ID NO: 180372 - DNA, 17 bp, synthetic construct
  source 1..17: mol_type = other DNA
gggggcccagggccgcc

SEQ ID NO: 180373 - DNA, 17 bp, synthetic construct
  source 1..17: mol_type = other DNA
ggggggcccagggccgc

SEQ ID NO: 180374 - DNA, 17 bp, synthetic construct
  source 1..17: mol_type = other DNA
gggggggcccagggccg

SEQ ID NO: 180375 - DNA, 17 bp, synthetic construct
  source 1..17: mol_type = other DNA
tgggggggcccagggcc

SEQ ID NO: 180376 - DNA, 17 bp, synthetic construct
  source 1..17: mol_type = other DNA
ttgggggggcccagggc

SEQ ID NO: 180377 - DNA, 17 bp, synthetic construct
  source 1..17: mol_type = other DNA
gttgggggggcccaggg

SEQ ID NO: 180378 - DNA, 17 bp, synthetic construct
  source 1..17: mol_type = other DNA
ggttgggggggcccagg

SEQ ID NO: 180379 - DNA, 17 bp, synthetic construct
  source 1..17: mol_type = other DNA
gggttgggggggcccag

SEQ ID NO: 180380 - DNA, 17 bp, synthetic construct
  source 1..17: mol_type = other DNA
ggggttgggggggccca

SEQ ID NO: 180381 - DNA, 17 bp, synthetic construct
  source 1..17: mol_type = other DNA
aggggttgggggggccc

SEQ ID NO: 180382 - DNA, 17 bp, synthetic construct
  source 1..17: mol_type = other DNA
aaggggttgggggggcc

SEQ ID NO: 180383 - DNA, 17 bp, synthetic construct
  source 1..17: mol_type = other DNA
caaggggttgggggggc

SEQ ID NO: 180384 - DNA, 17 bp, synthetic construct
  source 1..17: mol_type = other DNA
ccaaggggttggggggg

SEQ ID NO: 180385 - DNA, 17 bp, synthetic construct
  source 1..17: mol_type = other DNA
gccaaggggttgggggg

SEQ ID NO: 180386 - DNA, 17 bp, synthetic construct
  source 1..17: mol_type = other DNA
agccaaggggttggggg

SEQ ID NO: 180387 - DNA, 17 bp, synthetic construct
  source 1..17: mol_type = other DNA
aagccaaggggttgggg

SEQ ID NO: 180388 - DNA, 17 bp, synthetic construct
  source 1..17: mol_type = other DNA
caagccaaggggttggg

SEQ ID NO: 180389 - DNA, 17 bp, synthetic construct
  source 1..17: mol_type = other DNA
acaagccaaggggttgg

SEQ ID NO: 180390 - DNA, 17 bp, synthetic construct
  source 1..17: mol_type = other DNA
gacaagccaaggggttg

SEQ ID NO: 180391 - DNA, 17 bp, synthetic construct
  source 1..17: mol_type = other DNA
agacaagccaaggggtt

SEQ ID NO: 180392 - DNA, 17 bp, synthetic construct
  source 1..17: mol_type = other DNA
cagacaagccaaggggt

SEQ ID NO: 180393 - DNA, 17 bp, synthetic construct
  source 1..17: mol_type = other DNA
tcagacaagccaagggg

SEQ ID NO: 180394 - DNA, 17 bp, synthetic construct
  source 1..17: mol_type = other DNA
gtcagacaagccaaggg

SEQ ID NO: 180395 - DNA, 17 bp, synthetic construct
  source 1..17: mol_type = other DNA
tgtcagacaagccaagg

SEQ ID NO: 180396 - DNA, 17 bp, synthetic construct
  source 1..17: mol_type = other DNA
gtgtcagacaagccaag

SEQ ID NO: 180397 - DNA, 17 bp, synthetic construct
  source 1..17: mol_type = other DNA
ggtgtcagacaagccaa

SEQ ID NO: 180398 - DNA, 17 bp, synthetic construct
  source 1..17: mol_type = other DNA
aggtgtcagacaagcca

SEQ ID NO: 180399 - DNA, 17 bp, synthetic construct
  source 1..17: mol_type = other DNA
gaggtgtcagacaagcc

SEQ ID NO: 180400 - DNA, 17 bp, synthetic construct
  source 1..17: mol_type = other DNA
agaggtgtcagacaagc

SEQ ID NO: 180401 - DNA, 17 bp, synthetic construct
  source 1..17: mol_type = other DNA
gagaggtgtcagacaag

SEQ ID NO: 180402 - DNA, 17 bp, synthetic construct
  source 1..17: mol_type = other DNA
agagaggtgtcagacaa

SEQ ID NO: 180403 - DNA, 17 bp, synthetic construct
  source 1..17: mol_type = other DNA
cagagaggtgtcagaca

SEQ ID NO: 180404 - DNA, 17 bp, synthetic construct
  source 1..17: mol_type = other DNA
acagagaggtgtcagac

SEQ ID NO: 180405 - DNA, 17 bp, synthetic construct
  source 1..17: mol_type = other DNA
cacagagaggtgtcaga

SEQ ID NO: 180406 - DNA, 17 bp, synthetic construct
  source 1..17: mol_type = other DNA
gcacagagaggtgtcag

SEQ ID NO: 180407 - DNA, 17 bp, synthetic construct
  source 1..17: mol_type = other DNA
ggcacagagaggtgtca

SEQ ID NO: 180408 - DNA, 17 bp, synthetic construct
  source 1..17: mol_type = other DNA
gggcacagagaggtgtc

SEQ ID NO: 180409 - DNA, 17 bp, synthetic construct
  source 1..17: mol_type = other DNA
tgggcacagagaggtgt

SEQ ID NO: 180410 - DNA, 17 bp, synthetic construct
  source 1..17: mol_type = other DNA
gtgggcacagagaggtg

SEQ ID NO: 180411 - DNA, 17 bp, synthetic construct
  source 1..17: mol_type = other DNA
tgtgggcacagagaggt

SEQ ID NO: 180412 - DNA, 17 bp, synthetic construct
  source 1..17: mol_type = other DNA
ctgtgggcacagagagg

SEQ ID NO: 180413 - DNA, 17 bp, synthetic construct
  source 1..17: mol_type = other DNA
tctgtgggcacagagag

SEQ ID NO: 180414 - DNA, 17 bp, synthetic construct
  source 1..17: mol_type = other DNA
gtctgtgggcacagaga

SEQ ID NO: 180415 - DNA, 17 bp, synthetic construct
  source 1..17: mol_type = other DNA
ggtctgtgggcacagag

SEQ ID NO: 180416 - DNA, 17 bp, synthetic construct
  source 1..17: mol_type = other DNA
aggtctgtgggcacaga

SEQ ID NO: 180417 - DNA, 17 bp, synthetic construct
  source 1..17: mol_type = other DNA
gaggtctgtgggcacag

SEQ ID NO: 180418 - DNA, 17 bp, synthetic construct
  source 1..17: mol_type = other DNA
tgaggtctgtgggcaca

SEQ ID NO: 180419 - DNA, 17 bp, synthetic construct
  source 1..17: mol_type = other DNA
gtgaggtctgtgggcac

SEQ ID NO: 180420 - DNA, 17 bp, synthetic construct
  source 1..17: mol_type = other DNA
ggtgaggtctgtgggca

SEQ ID NO: 180421 - DNA, 17 bp, synthetic construct
  source 1..17: mol_type = other DNA
aggtgaggtctgtgggc

SEQ ID NO: 180422 - DNA, 17 bp, synthetic construct
  source 1..17: mol_type = other DNA
caggtgaggtctgtggg

SEQ ID NO: 180423 - DNA, 17 bp, synthetic construct
  source 1..17: mol_type = other DNA
gcaggtgaggtctgtgg

SEQ ID NO: 180424 - DNA, 17 bp, synthetic construct
  source 1..17: mol_type = other DNA
ggcaggtgaggtctgtg

SEQ ID NO: 180425 - DNA, 17 bp, synthetic construct
  source 1..17: mol_type = other DNA
gggcaggtgaggtctgt

SEQ ID NO: 180426 - DNA, 17 bp, synthetic construct
  source 1..17: mol_type = other DNA
tgggcaggtgaggtctg

SEQ ID NO: 180427 - DNA, 17 bp, synthetic construct
  source 1..17: mol_type = other DNA
gtgggcaggtgaggtct

SEQ ID NO: 180428 - DNA, 17 bp, synthetic construct
  source 1..17: mol_type = other DNA
ggtgggcaggtgaggtc

SEQ ID NO: 180429 - DNA, 17 bp, synthetic construct
  source 1..17: mol_type = other DNA
gggtgggcaggtgaggt

SEQ ID NO: 180430 - DNA, 17 bp, synthetic construct
  source 1..17: mol_type = other DNA
tgggtgggcaggtgagg

SEQ ID NO: 180431 - DNA, 17 bp, synthetic construct
  source 1..17: mol_type = other DNA
gtgggtgggcaggtgag

SEQ ID NO: 180432 - DNA, 17 bp, synthetic construct
  source 1..17: mol_type = other DNA
ggtgggtgggcaggtga

SEQ ID NO: 180433 - DNA, 17 bp, synthetic construct
  source 1..17: mol_type = other DNA
tggtgggtgggcaggtg

SEQ ID NO: 180434 - DNA, 17 bp, synthetic construct
  source 1..17: mol_type = other DNA
ttggtgggtgggcaggt

SEQ ID NO: 180435 - DNA, 17 bp, synthetic construct
  source 1..17: mol_type = other DNA
tttggtgggtgggcagg

SEQ ID NO: 180436 - DNA, 17 bp, synthetic construct
  source 1..17: mol_type = other DNA
ctttggtgggtgggcag

SEQ ID NO: 180437 - DNA, 17 bp, synthetic construct
  source 1..17: mol_type = other DNA
actttggtgggtgggca

SEQ ID NO: 180438 - DNA, 17 bp, synthetic construct
  source 1..17: mol_type = other DNA
cactttggtgggtgggc

SEQ ID NO: 180439 - DNA, 17 bp, synthetic construct
  source 1..17: mol_type = other DNA
acactttggtgggtggg

SEQ ID NO: 180440 - DNA, 17 bp, synthetic construct
  source 1..17: mol_type = other DNA
tacactttggtgggtgg

SEQ ID NO: 180441 - DNA, 17 bp, synthetic construct
  source 1..17: mol_type = other DNA
gtacactttggtgggtg

SEQ ID NO: 180442 - DNA, 17 bp, synthetic construct
  source 1..17: mol_type = other DNA
tgtacactttggtgggt

SEQ ID NO: 180443 - DNA, 17 bp, synthetic construct
  source 1..17: mol_type = other DNA
ttgtacactttggtggg

SEQ ID NO: 180444 - DNA, 17 bp, synthetic construct
  source 1..17: mol_type = other DNA
cttgtacactttggtgg

SEQ ID NO: 180445 - DNA, 17 bp, synthetic construct
  source 1..17: mol_type = other DNA
gcttgtacactttggtg

SEQ ID NO: 180446 - DNA, 17 bp, synthetic construct
  source 1..17: mol_type = other DNA
ggcttgtacactttggt

SEQ ID NO: 180447 - DNA, 17 bp, synthetic construct
  source 1..17: mol_type = other DNA
tggcttgtacactttgg

SEQ ID NO: 180448 - DNA, 17 bp, synthetic construct
  source 1..17: mol_type = other DNA
atggcttgtacactttg

SEQ ID NO: 180449 - DNA, 17 bp, synthetic construct
  source 1..17: mol_type = other DNA
catggcttgtacacttt

SEQ ID NO: 180450 - DNA, 17 bp, synthetic construct
  source 1..17: mol_type = other DNA
gcatggcttgtacactt

SEQ ID NO: 180451 - DNA, 17 bp, synthetic construct
  source 1..17: mol_type = other DNA
cgcatggcttgtacact

SEQ ID NO: 180452 - DNA, 17 bp, synthetic construct
  source 1..17: mol_type = other DNA
ccgcatggcttgtacac

SEQ ID NO: 180453 - DNA, 17 bp, synthetic construct
  source 1..17: mol_type = other DNA
gccgcatggcttgtaca

SEQ ID NO: 180454 - DNA, 17 bp, synthetic construct
  source 1..17: mol_type = other DNA
ggccgcatggcttgtac

SEQ ID NO: 180455 - DNA, 17 bp, synthetic construct
  source 1..17: mol_type = other DNA
gggccgcatggcttgta

SEQ ID NO: 180456 - DNA, 17 bp, synthetic construct
  source 1..17: mol_type = other DNA
ggggccgcatggcttgt

SEQ ID NO: 180457 - DNA, 17 bp, synthetic construct
  source 1..17: mol_type = other DNA
tggggccgcatggcttg

SEQ ID NO: 180458 - DNA, 17 bp, synthetic construct
  source 1..17: mol_type = other DNA
atggggccgcatggctt

SEQ ID NO: 180459 - DNA, 17 bp, synthetic construct
  source 1..17: mol_type = other DNA
tatggggccgcatggct

SEQ ID NO: 180460 - DNA, 17 bp, synthetic construct
  source 1..17: mol_type = other DNA
gtatggggccgcatggc

SEQ ID NO: 180461 - DNA, 17 bp, synthetic construct
  source 1..17: mol_type = other DNA
tgtatggggccgcatgg

SEQ ID NO: 180462 - DNA, 17 bp, synthetic construct
  source 1..17: mol_type = other DNA
ctgtatggggccgcatg

SEQ ID NO: 180463 - DNA, 17 bp, synthetic construct
  source 1..17: mol_type = other DNA
gctgtatggggccgcat

SEQ ID NO: 180464 - DNA, 17 bp, synthetic construct
  source 1..17: mol_type = other DNA
ggctgtatggggccgca

SEQ ID NO: 180465 - DNA, 17 bp, synthetic construct
  source 1..17: mol_type = other DNA
aggctgtatggggccgc

SEQ ID NO: 180466 - DNA, 17 bp, synthetic construct
  source 1..17: mol_type = other DNA
caggctgtatggggccg

SEQ ID NO: 180467 - DNA, 17 bp, synthetic construct
  source 1..17: mol_type = other DNA
gcaggctgtatggggcc

SEQ ID NO: 180468 - DNA, 17 bp, synthetic construct
  source 1..17: mol_type = other DNA
ggcaggctgtatggggc

SEQ ID NO: 180469 - DNA, 17 bp, synthetic construct
  source 1..17: mol_type = other DNA
tggcaggctgtatgggg

SEQ ID NO: 180470 - DNA, 17 bp, synthetic construct
  source 1..17: mol_type = other DNA
gtggcaggctgtatggg

SEQ ID NO: 180471 - DNA, 17 bp, synthetic construct
  source 1..17: mol_type = other DNA
ggtggcaggctgtatgg

SEQ ID NO: 180472 - DNA, 17 bp, synthetic construct
  source 1..17: mol_type = other DNA
aggtggcaggctgtatg

SEQ ID NO: 180473 - DNA, 17 bp, synthetic construct
  source 1..17: mol_type = other DNA
caggtggcaggctgtat

SEQ ID NO: 180474 - DNA, 17 bp, synthetic construct
  source 1..17: mol_type = other DNA
gcaggtggcaggctgta

SEQ ID NO: 180475 - DNA, 17 bp, synthetic construct
  source 1..17: mol_type = other DNA
tgcaggtggcaggctgt

SEQ ID NO: 180476 - DNA, 17 bp, synthetic construct
  source 1..17: mol_type = other DNA
ttgcaggtggcaggctg

SEQ ID NO: 180477 - DNA, 17 bp, synthetic construct
  source 1..17: mol_type = other DNA
gttgcaggtggcaggct

SEQ ID NO: 180478 - DNA, 17 bp, synthetic construct
  source 1..17: mol_type = other DNA
agttgcaggtggcaggc

SEQ ID NO: 180479 - DNA, 17 bp, synthetic construct
  source 1..17: mol_type = other DNA
gagttgcaggtggcagg

SEQ ID NO: 180480 - DNA, 17 bp, synthetic construct
  source 1..17: mol_type = other DNA
agagttgcaggtggcag

SEQ ID NO: 180481 - DNA, 17 bp, synthetic construct
  source 1..17: mol_type = other DNA
tagagttgcaggtggca

SEQ ID NO: 180482 - DNA, 17 bp, synthetic construct
  source 1..17: mol_type = other DNA
ctagagttgcaggtggc

SEQ ID NO: 180483 - DNA, 17 bp, synthetic construct
  source 1..17: mol_type = other DNA
cctagagttgcaggtgg

SEQ ID NO: 180484 - DNA, 17 bp, synthetic construct
  source 1..17: mol_type = other DNA
acctagagttgcaggtg

SEQ ID NO: 180485 - DNA, 17 bp, synthetic construct
  source 1..17: mol_type = other DNA
tacctagagttgcaggt

SEQ ID NO: 180486 - DNA, 17 bp, synthetic construct
  source 1..17: mol_type = other DNA
ttacctagagttgcagg

SEQ ID NO: 180487 - DNA, 17 bp, synthetic construct
  source 1..17: mol_type = other DNA
cttacctagagttgcag

SEQ ID NO: 180488 - DNA, 17 bp, synthetic construct
  source 1..17: mol_type = other DNA
acttacctagagttgca

SEQ ID NO: 180489 - DNA, 17 bp, synthetic construct
  source 1..17: mol_type = other DNA
tacttacctagagttgc

SEQ ID NO: 180490 - DNA, 17 bp, synthetic construct
  source 1..17: mol_type = other DNA
gtacttacctagagttg

SEQ ID NO: 180491 - DNA, 17 bp, synthetic construct
  source 1..17: mol_type = other DNA
tgtacttacctagagtt

SEQ ID NO: 180492 - DNA, 17 bp, synthetic construct
  source 1..17: mol_type = other DNA
ctgtacttacctagagt

SEQ ID NO: 180493 - DNA, 17 bp, synthetic construct
  source 1..17: mol_type = other DNA
cctgtacttacctagag

SEQ ID NO: 180494 - DNA, 17 bp, synthetic construct
  source 1..17: mol_type = other DNA
ccctgtacttacctaga

SEQ ID NO: 180495 - DNA, 17 bp, synthetic construct
  source 1..17: mol_type = other DNA
tccctgtacttacctag

SEQ ID NO: 180496 - DNA, 17 bp, synthetic construct
  source 1..17: mol_type = other DNA
atccctgtacttaccta

SEQ ID NO: 180497 - DNA, 17 bp, synthetic construct
  source 1..17: mol_type = other DNA
catccctgtacttacct

SEQ ID NO: 180498 - DNA, 17 bp, synthetic construct
  source 1..17: mol_type = other DNA
ccatccctgtacttacc

SEQ ID NO: 180499 - DNA, 17 bp, synthetic construct
  source 1..17: mol_type = other DNA
gccatccctgtacttac

SEQ ID NO: 180500 - DNA, 17 bp, synthetic construct
  source 1..17: mol_type = other DNA
agccatccctgtactta

SEQ ID NO: 180501 - DNA, 17 bp, synthetic construct
  source 1..17: mol_type = other DNA
cagccatccctgtactt

SEQ ID NO: 180502 - DNA, 17 bp, synthetic construct
  source 1..17: mol_type = other DNA
ccagccatccctgtact

SEQ ID NO: 180503 - DNA, 17 bp, synthetic construct
  source 1..17: mol_type = other DNA
accagccatccctgtac

SEQ ID NO: 180504 - DNA, 17 bp, synthetic construct
  source 1..17: mol_type = other DNA
caccagccatccctgta

SEQ ID NO: 180505 - DNA, 17 bp, synthetic construct
  source 1..17: mol_type = other DNA
gcaccagccatccctgt

SEQ ID NO: 180506 - DNA, 17 bp, synthetic construct
  source 1..17: mol_type = other DNA
ggcaccagccatccctg

SEQ ID NO: 180507 - DNA, 17 bp, synthetic construct
  source 1..17: mol_type = other DNA
aggcaccagccatccct

SEQ ID NO: 180508 - DNA, 17 bp, synthetic construct
  source 1..17: mol_type = other DNA
aaggcaccagccatccc

SEQ ID NO: 180509 - DNA, 17 bp, synthetic construct
  source 1..17: mol_type = other DNA
gaaggcaccagccatcc

SEQ ID NO: 180510 - DNA, 17 bp, synthetic construct
  source 1..17: mol_type = other DNA
ggaaggcaccagccatc

SEQ ID NO: 180511 - DNA, 17 bp, synthetic construct
  source 1..17: mol_type = other DNA
gggaaggcaccagccat

SEQ ID NO: 180512 - DNA, 17 bp, synthetic construct
  source 1..17: mol_type = other DNA
agggaaggcaccagcca

SEQ ID NO: 180513 - DNA, 17 bp, synthetic construct
  source 1..17: mol_type = other DNA
cagggaaggcaccagcc

SEQ ID NO: 180514 - DNA, 17 bp, synthetic construct
  source 1..17: mol_type = other DNA
gcagggaaggcaccagc

SEQ ID NO: 180515 - DNA, 17 bp, synthetic construct
  source 1..17: mol_type = other DNA
ggcagggaaggcaccag

SEQ ID NO: 180516 - DNA, 17 bp, synthetic construct
  source 1..17: mol_type = other DNA
tggcagggaaggcacca

SEQ ID NO: 180517 - DNA, 17 bp, synthetic construct
  source 1..17: mol_type = other DNA
gtggcagggaaggcacc

SEQ ID NO: 180518 - DNA, 17 bp, synthetic construct
  source 1..17: mol_type = other DNA
ggtggcagggaaggcac

SEQ ID NO: 180519 - DNA, 17 bp, synthetic construct
  source 1..17: mol_type = other DNA
gggtggcagggaaggca

SEQ ID NO: 180520 - DNA, 17 bp, synthetic construct
  source 1..17: mol_type = other DNA
tgggtggcagggaaggc

SEQ ID NO: 180521 - DNA, 17 bp, synthetic construct
  source 1..17: mol_type = other DNA
ctgggtggcagggaagg

SEQ ID NO: 180522 - DNA, 17 bp, synthetic construct
  source 1..17: mol_type = other DNA
cctgggtggcagggaag

SEQ ID NO: 180523 - DNA, 17 bp, synthetic construct
  source 1..17: mol_type = other DNA
gcctgggtggcagggaa

SEQ ID NO: 180524 - DNA, 17 bp, synthetic construct
  source 1..17: mol_type = other DNA
ggcctgggtggcaggga

SEQ ID NO: 180525 - DNA, 17 bp, synthetic construct
  source 1..17: mol_type = other DNA
aggcctgggtggcaggg

SEQ ID NO: 180526 - DNA, 17 bp, synthetic construct
  source 1..17: mol_type = other DNA
caggcctgggtggcagg

SEQ ID NO: 180527 - DNA, 17 bp, synthetic construct
  source 1..17: mol_type = other DNA
gcaggcctgggtggcag

SEQ ID NO: 180528 - DNA, 17 bp, synthetic construct
  source 1..17: mol_type = other DNA
ggcaggcctgggtggca

SEQ ID NO: 180529 - DNA, 17 bp, synthetic construct
  source 1..17: mol_type = other DNA
aggcaggcctgggtggc

SEQ ID NO: 180530 - DNA, 17 bp, synthetic construct
  source 1..17: mol_type = other DNA
caggcaggcctgggtgg

SEQ ID NO: 180531 - DNA, 17 bp, synthetic construct
  source 1..17: mol_type = other DNA
tcaggcaggcctgggtg

SEQ ID NO: 180532 - DNA, 17 bp, synthetic construct
  source 1..17: mol_type = other DNA
gtcaggcaggcctgggt

SEQ ID NO: 180533 - DNA, 17 bp, synthetic construct
  source 1..17: mol_type = other DNA
ggtcaggcaggcctggg

SEQ ID NO: 180534 - DNA, 17 bp, synthetic construct
  source 1..17: mol_type = other DNA
cggtcaggcaggcctgg

SEQ ID NO: 180535 - DNA, 17 bp, synthetic construct
  source 1..17: mol_type = other DNA
ccggtcaggcaggcctg

SEQ ID NO: 180536 - DNA, 17 bp, synthetic construct
  source 1..17: mol_type = other DNA
accggtcaggcaggcct

SEQ ID NO: 180537 - DNA, 17 bp, synthetic construct
  source 1..17: mol_type = other DNA
gaccggtcaggcaggcc

SEQ ID NO: 180538 - DNA, 17 bp, synthetic construct
  source 1..17: mol_type = other DNA
agaccggtcaggcaggc

SEQ ID NO: 180539 - DNA, 17 bp, synthetic construct
  source 1..17: mol_type = other DNA
cagaccggtcaggcagg

SEQ ID NO: 180540 - DNA, 17 bp, synthetic construct
  source 1..17: mol_type = other DNA
ccagaccggtcaggcag

SEQ ID NO: 180541 - DNA, 17 bp, synthetic construct
  source 1..17: mol_type = other DNA
cccagaccggtcaggca

SEQ ID NO: 180542 - DNA, 17 bp, synthetic construct
  source 1..17: mol_type = other DNA
ccccagaccggtcaggc

SEQ ID NO: 180543 - DNA, 17 bp, synthetic construct
  source 1..17: mol_type = other DNA
cccccagaccggtcagg

SEQ ID NO: 180544 - DNA, 17 bp, synthetic construct
  source 1..17: mol_type = other DNA
tcccccagaccggtcag

SEQ ID NO: 180545 - DNA, 17 bp, synthetic construct
  source 1..17: mol_type = other DNA
ctcccccagaccggtca

SEQ ID NO: 180546 - DNA, 17 bp, synthetic construct
  source 1..17: mol_type = other DNA
gctcccccagaccggtc

SEQ ID NO: 180547 - DNA, 17 bp, synthetic construct
  source 1..17: mol_type = other DNA
tgctcccccagaccggt

SEQ ID NO: 180548 - DNA, 17 bp, synthetic construct
  source 1..17: mol_type = other DNA
ctgctcccccagaccgg

SEQ ID NO: 180549 - DNA, 17 bp, synthetic construct
  source 1..17: mol_type = other DNA
cctgctcccccagaccg

SEQ ID NO: 180550 - DNA, 17 bp, synthetic construct
  source 1..17: mol_type = other DNA
tcctgctcccccagacc

SEQ ID NO: 180551 - DNA, 17 bp, synthetic construct
  source 1..17: mol_type = other DNA
ctcctgctcccccagac

SEQ ID NO: 180552 - DNA, 17 bp, synthetic construct
  source 1..17: mol_type = other DNA
cctcctgctcccccaga

SEQ ID NO: 180553 - DNA, 17 bp, synthetic construct
  source 1..17: mol_type = other DNA
tcctcctgctcccccag

SEQ ID NO: 180554 - DNA, 17 bp, synthetic construct
  source 1..17: mol_type = other DNA
ctcctcctgctccccca

SEQ ID NO: 180555 - DNA, 17 bp, synthetic construct
  source 1..17: mol_type = other DNA
cctcctcctgctccccc

SEQ ID NO: 180556 - DNA, 17 bp, synthetic construct
  source 1..17: mol_type = other DNA
gcctcctcctgctcccc

SEQ ID NO: 180557 - DNA, 17 bp, synthetic construct
  source 1..17: mol_type = other DNA
ggcctcctcctgctccc

SEQ ID NO: 180558 - DNA, 17 bp, synthetic construct
  source 1..17: mol_type = other DNA
tggcctcctcctgctcc

SEQ ID NO: 180559 - DNA, 17 bp, synthetic construct
  source 1..17: mol_type = other DNA
ctggcctcctcctgctc

SEQ ID NO: 180560 - DNA, 17 bp, synthetic construct
  source 1..17: mol_type = other DNA
tctggcctcctcctgct

SEQ ID NO: 180561 - DNA, 17 bp, synthetic construct
  source 1..17: mol_type = other DNA
ctctggcctcctcctgc

SEQ ID NO: 180562 - DNA, 17 bp, synthetic construct
  source 1..17: mol_type = other DNA
cctctggcctcctcctg

SEQ ID NO: 180563 - DNA, 17 bp, synthetic construct
  source 1..17: mol_type = other DNA
ccctctggcctcctcct

SEQ ID NO: 180564 - DNA, 17 bp, synthetic construct
  source 1..17: mol_type = other DNA
accctctggcctcctcc

SEQ ID NO: 180565 - DNA, 17 bp, synthetic construct
  source 1..17: mol_type = other DNA
caccctctggcctcctc

SEQ ID NO: 180566 - DNA, 17 bp, synthetic construct
  source 1..17: mol_type = other DNA
acaccctctggcctcct

SEQ ID NO: 180567 - DNA, 17 bp, synthetic construct
  source 1..17: mol_type = other DNA
gacaccctctggcctcc

SEQ ID NO: 180568 - DNA, 17 bp, synthetic construct
  source 1..17: mol_type = other DNA
ggacaccctctggcctc

SEQ ID NO: 180569 - DNA, 17 bp, synthetic construct
  source 1..17: mol_type = other DNA
gggacaccctctggcct

SEQ ID NO: 180570 - DNA, 17 bp, synthetic construct
  source 1..17: mol_type = other DNA
tgggacaccctctggcc

SEQ ID NO: 180571 - DNA, 17 bp, synthetic construct
  source 1..17: mol_type = other DNA
gtgggacaccctctggc

SEQ ID NO: 180572 - DNA, 17 bp, synthetic construct
  source 1..17: mol_type = other DNA
agtgggacaccctctgg

SEQ ID NO: 180573 - DNA, 17 bp, synthetic construct
  source 1..17: mol_type = other DNA
cagtgggacaccctctg

SEQ ID NO: 180574 - DNA, 17 bp, synthetic construct
  source 1..17: mol_type = other DNA
acagtgggacaccctct

SEQ ID NO: 180575 - DNA, 17 bp, synthetic construct
  source 1..17: mol_type = other DNA
cacagtgggacaccctc

SEQ ID NO: 180576 - DNA, 17 bp, synthetic construct
  source 1..17: mol_type = other DNA
ccacagtgggacaccct

SEQ ID NO: 180577 - DNA, 17 bp, synthetic construct
  source 1..17: mol_type = other DNA
cccacagtgggacaccc

SEQ ID NO: 180578 - DNA, 17 bp, synthetic construct
  source 1..17: mol_type = other DNA
gcccacagtgggacacc

SEQ ID NO: 180579 - DNA, 17 bp, synthetic construct
  source 1..17: mol_type = other DNA
ggcccacagtgggacac

SEQ ID NO: 180580 - DNA, 17 bp, synthetic construct
  source 1..17: mol_type = other DNA
tggcccacagtgggaca

SEQ ID NO: 180581 - DNA, 17 bp, synthetic construct
  source 1..17: mol_type = other DNA
gtggcccacagtgggac

SEQ ID NO: 180582 - DNA, 17 bp, synthetic construct
  source 1..17: mol_type = other DNA
tgtggcccacagtggga

SEQ ID NO: 180583 - DNA, 17 bp, synthetic construct
  source 1..17: mol_type = other DNA
ctgtggcccacagtggg

SEQ ID NO: 180584 - DNA, 17 bp, synthetic construct
  source 1..17: mol_type = other DNA
tctgtggcccacagtgg

SEQ ID NO: 180585 - DNA, 17 bp, synthetic construct
  source 1..17: mol_type = other DNA
atctgtggcccacagtg

SEQ ID NO: 180586 - DNA, 17 bp, synthetic construct
  source 1..17: mol_type = other DNA
gatctgtggcccacagt

SEQ ID NO: 180587 - DNA, 17 bp, synthetic construct
  source 1..17: mol_type = other DNA
agatctgtggcccacag

SEQ ID NO: 180588 - DNA, 17 bp, synthetic construct
  source 1..17: mol_type = other DNA
gagatctgtggcccaca

SEQ ID NO: 180589 - DNA, 17 bp, synthetic construct
  source 1..17: mol_type = other DNA
agagatctgtggcccac

SEQ ID NO: 180590 - DNA, 17 bp, synthetic construct
  source 1..17: mol_type = other DNA
cagagatctgtggccca

SEQ ID NO: 180591 - DNA, 17 bp, synthetic construct
  source 1..17: mol_type = other DNA
ccagagatctgtggccc

SEQ ID NO: 180592 - DNA, 17 bp, synthetic construct
  source 1..17: mol_type = other DNA
cccagagatctgtggcc

SEQ ID NO: 180593 - DNA, 17 bp, synthetic construct
  source 1..17: mol_type = other DNA
ccccagagatctgtggc

SEQ ID NO: 180594 - DNA, 17 bp, synthetic construct
  source 1..17: mol_type = other DNA
accccagagatctgtgg

SEQ ID NO: 180595 - DNA, 17 bp, synthetic construct
  source 1..17: mol_type = other DNA
caccccagagatctgtg

SEQ ID NO: 180596 - DNA, 17 bp, synthetic construct
  source 1..17: mol_type = other DNA
gcaccccagagatctgt

SEQ ID NO: 180597 - DNA, 17 bp, synthetic construct
  source 1..17: mol_type = other DNA
ggcaccccagagatctg

SEQ ID NO: 180598 - DNA, 17 bp, synthetic construct
  source 1..17: mol_type = other DNA
gggcaccccagagatct

SEQ ID NO: 180599 - DNA, 17 bp, synthetic construct
  source 1..17: mol_type = other DNA
cgggcaccccagagatc

SEQ ID NO: 180600 - DNA, 17 bp, synthetic construct
  source 1..17: mol_type = other DNA
tcgggcaccccagagat

SEQ ID NO: 180601 - DNA, 17 bp, synthetic construct
  source 1..17: mol_type = other DNA
ctcgggcaccccagaga

SEQ ID NO: 180602 - DNA, 17 bp, synthetic construct
  source 1..17: mol_type = other DNA
gctcgggcaccccagag

SEQ ID NO: 180603 - DNA, 17 bp, synthetic construct
  source 1..17: mol_type = other DNA
ggctcgggcaccccaga

SEQ ID NO: 180604 - DNA, 17 bp, synthetic construct
  source 1..17: mol_type = other DNA
gggctcgggcaccccag

SEQ ID NO: 180605 - DNA, 17 bp, synthetic construct
  source 1..17: mol_type = other DNA
tgggctcgggcacccca

SEQ ID NO: 180606 - DNA, 17 bp, synthetic construct
  source 1..17: mol_type = other DNA
ctgggctcgggcacccc

SEQ ID NO: 180607 - DNA, 17 bp, synthetic construct
  source 1..17: mol_type = other DNA
cctgggctcgggcaccc

SEQ ID NO: 180608 - DNA, 17 bp, synthetic construct
  source 1..17: mol_type = other DNA
tcctgggctcgggcacc

SEQ ID NO: 180609 - DNA, 17 bp, synthetic construct
  source 1..17: mol_type = other DNA
gtcctgggctcgggcac

SEQ ID NO: 180610 - DNA, 17 bp, synthetic construct
  source 1..17: mol_type = other DNA
agtcctgggctcgggca

SEQ ID NO: 180611 - DNA, 17 bp, synthetic construct
  source 1..17: mol_type = other DNA
gagtcctgggctcgggc

SEQ ID NO: 180612 - DNA, 17 bp, synthetic construct
  source 1..17: mol_type = other DNA
ggagtcctgggctcggg

SEQ ID NO: 180613 - DNA, 17 bp, synthetic construct
  source 1..17: mol_type = other DNA
aggagtcctgggctcgg

SEQ ID NO: 180614 - DNA, 17 bp, synthetic construct
  source 1..17: mol_type = other DNA
aaggagtcctgggctcg

SEQ ID NO: 180615 - DNA, 17 bp, synthetic construct
  source 1..17: mol_type = other DNA
caaggagtcctgggctc

SEQ ID NO: 180616 - DNA, 17 bp, synthetic construct
  source 1..17: mol_type = other DNA
ccaaggagtcctgggct

SEQ ID NO: 180617 - DNA, 17 bp, synthetic construct
  source 1..17: mol_type = other DNA
tccaaggagtcctgggc

SEQ ID NO: 180618 - DNA, 17 bp, synthetic construct
  source 1..17: mol_type = other DNA
ttccaaggagtcctggg

SEQ ID NO: 180619 - DNA, 17 bp, synthetic construct
  source 1..17: mol_type = other DNA
tttccaaggagtcctgg

SEQ ID NO: 180620 - DNA, 17 bp, synthetic construct
  source 1..17: mol_type = other DNA
ttttccaaggagtcctg

SEQ ID NO: 180621 - DNA, 17 bp, synthetic construct
  source 1..17: mol_type = other DNA
gttttccaaggagtcct

SEQ ID NO: 180622 - DNA, 17 bp, synthetic construct
  source 1..17: mol_type = other DNA
tgttttccaaggagtcc

SEQ ID NO: 180623 - DNA, 17 bp, synthetic construct
  source 1..17: mol_type = other DNA
atgttttccaaggagtc

SEQ ID NO: 180624 - DNA, 17 bp, synthetic construct
  source 1..17: mol_type = other DNA
gatgttttccaaggagt

SEQ ID NO: 180625 - DNA, 17 bp, synthetic construct
  source 1..17: mol_type = other DNA
ggatgttttccaaggag

SEQ ID NO: 180626 - DNA, 17 bp, synthetic construct
  source 1..17: mol_type = other DNA
gggatgttttccaagga

SEQ ID NO: 180627 - DNA, 17 bp, synthetic construct
  source 1..17: mol_type = other DNA
ggggatgttttccaagg

SEQ ID NO: 180628 - DNA, 17 bp, synthetic construct
  source 1..17: mol_type = other DNA
aggggatgttttccaag

SEQ ID NO: 180629 - DNA, 17 bp, synthetic construct
  source 1..17: mol_type = other DNA
caggggatgttttccaa

SEQ ID NO: 180630 - DNA, 17 bp, synthetic construct
  source 1..17: mol_type = other DNA
gcaggggatgttttcca

SEQ ID NO: 180631 - DNA, 17 bp, synthetic construct
  source 1..17: mol_type = other DNA
agcaggggatgttttcc

SEQ ID NO: 180632 - DNA, 17 bp, synthetic construct
  source 1..17: mol_type = other DNA
cagcaggggatgttttc

SEQ ID NO: 180633 - DNA, 17 bp, synthetic construct
  source 1..17: mol_type = other DNA
gcagcaggggatgtttt

SEQ ID NO: 180634 - DNA, 17 bp, synthetic construct
  source 1..17: mol_type = other DNA
agcagcaggggatgttt

SEQ ID NO: 180635 - DNA, 17 bp, synthetic construct
  source 1..17: mol_type = other DNA
gagcagcaggggatgtt

SEQ ID NO: 180636 - DNA, 17 bp, synthetic construct
  source 1..17: mol_type = other DNA
ggagcagcaggggatgt

SEQ ID NO: 180637 - DNA, 17 bp, synthetic construct
  source 1..17: mol_type = other DNA
gggagcagcaggggatg

SEQ ID NO: 180638 - DNA, 17 bp, synthetic construct
  source 1..17: mol_type = other DNA
tgggagcagcaggggat

SEQ ID NO: 180639 - DNA, 17 bp, synthetic construct
  source 1..17: mol_type = other DNA
ctgggagcagcagggga

SEQ ID NO: 180640 - DNA, 17 bp, synthetic construct
  source 1..17: mol_type = other DNA
tctgggagcagcagggg

SEQ ID NO: 180641 - DNA, 17 bp, synthetic construct
  source 1..17: mol_type = other DNA
atctgggagcagcaggg

SEQ ID NO: 180642 - DNA, 17 bp, synthetic construct
  source 1..17: mol_type = other DNA
catctgggagcagcagg

SEQ ID NO: 180643 - DNA, 17 bp, synthetic construct
  source 1..17: mol_type = other DNA
gcatctgggagcagcag

SEQ ID NO: 180644 - DNA, 17 bp, synthetic construct
  source 1..17: mol_type = other DNA
ggcatctgggagcagca

SEQ ID NO: 180645 - DNA, 17 bp, synthetic construct
  source 1..17: mol_type = other DNA
aggcatctgggagcagc

SEQ ID NO: 180646 - DNA, 17 bp, synthetic construct
  source 1..17: mol_type = other DNA
aaggcatctgggagcag

SEQ ID NO: 180647 - DNA, 17 bp, synthetic construct
  source 1..17: mol_type = other DNA
taaggcatctgggagca

SEQ ID NO: 180648 - DNA, 17 bp, synthetic construct
  source 1..17: mol_type = other DNA
ctaaggcatctgggagc

SEQ ID NO: 180649 - DNA, 17 bp, synthetic construct
  source 1..17: mol_type = other DNA
tctaaggcatctgggag

SEQ ID NO: 180650 - DNA, 17 bp, synthetic construct
  source 1..17: mol_type = other DNA
ctctaaggcatctggga

SEQ ID NO: 180651 - DNA, 17 bp, synthetic construct
  source 1..17: mol_type = other DNA
tctctaaggcatctggg

SEQ ID NO: 180652 - DNA, 17 bp, synthetic construct
  source 1..17: mol_type = other DNA
gtctctaaggcatctgg

SEQ ID NO: 180653 - DNA, 17 bp, synthetic construct
  source 1..17: mol_type = other DNA
tgtctctaaggcatctg

SEQ ID NO: 180654 - DNA, 17 bp, synthetic construct
  source 1..17: mol_type = other DNA
ctgtctctaaggcatct

SEQ ID NO: 180655 - DNA, 17 bp, synthetic construct
  source 1..17: mol_type = other DNA
tctgtctctaaggcatc

SEQ ID NO: 180656 - DNA, 17 bp, synthetic construct
  source 1..17: mol_type = other DNA
ctctgtctctaaggcat

SEQ ID NO: 180657 - DNA, 17 bp, synthetic construct
  source 1..17: mol_type = other DNA
actctgtctctaaggca

SEQ ID NO: 180658 - DNA, 17 bp, synthetic construct
  source 1..17: mol_type = other DNA
gactctgtctctaaggc

SEQ ID NO: 180659 - DNA, 17 bp, synthetic construct
  source 1..17: mol_type = other DNA
tgactctgtctctaagg

SEQ ID NO: 180660 - DNA, 17 bp, synthetic construct
  source 1..17: mol_type = other DNA
ctgactctgtctctaag

SEQ ID NO: 180661 - DNA, 17 bp, synthetic construct
  source 1..17: mol_type = other DNA
cctgactctgtctctaa

SEQ ID NO: 180662 - DNA, 17 bp, synthetic construct
  source 1..17: mol_type = other DNA
gcctgactctgtctcta

SEQ ID NO: 180663 - DNA, 17 bp, synthetic construct
  source 1..17: mol_type = other DNA
tgcctgactctgtctct

SEQ ID NO: 180664 - DNA, 17 bp, synthetic construct
  source 1..17: mol_type = other DNA
ctgcctgactctgtctc

SEQ ID NO: 180665 - DNA, 17 bp, synthetic construct
  source 1..17: mol_type = other DNA
cctgcctgactctgtct

SEQ ID NO: 180666 - DNA, 17 bp, synthetic construct
  source 1..17: mol_type = other DNA
ccctgcctgactctgtc

SEQ ID NO: 180667 - DNA, 17 bp, synthetic construct
  source 1..17: mol_type = other DNA
cccctgcctgactctgt

SEQ ID NO: 180668 - DNA, 17 bp, synthetic construct
  source 1..17: mol_type = other DNA
ccccctgcctgactctg

SEQ ID NO: 180669 - DNA, 17 bp, synthetic construct
  source 1..17: mol_type = other DNA
gccccctgcctgactct

SEQ ID NO: 180670 - DNA, 17 bp, synthetic construct
  source 1..17: mol_type = other DNA
cgccccctgcctgactc

SEQ ID NO: 180671 - DNA, 17 bp, synthetic construct
  source 1..17: mol_type = other DNA
gcgccccctgcctgact

SEQ ID NO: 180672 - DNA, 17 bp, synthetic construct
  source 1..17: mol_type = other DNA
tgcgccccctgcctgac

SEQ ID NO: 180673 - DNA, 17 bp, synthetic construct
  source 1..17: mol_type = other DNA
atgcgccccctgcctga

SEQ ID NO: 180674 - DNA, 17 bp, synthetic construct
  source 1..17: mol_type = other DNA
gatgcgccccctgcctg

SEQ ID NO: 180675 - DNA, 17 bp, synthetic construct
  source 1..17: mol_type = other DNA
ggatgcgccccctgcct

SEQ ID NO: 180676 - DNA, 17 bp, synthetic construct
  source 1..17: mol_type = other DNA
gggatgcgccccctgcc

SEQ ID NO: 180677 - DNA, 17 bp, synthetic construct
  source 1..17: mol_type = other DNA
agggatgcgccccctgc

SEQ ID NO: 180678 - DNA, 17 bp, synthetic construct
  source 1..17: mol_type = other DNA
cagggatgcgccccctg

SEQ ID NO: 180679 - DNA, 17 bp, synthetic construct
  source 1..17: mol_type = other DNA
ccagggatgcgccccct

SEQ ID NO: 180680 - DNA, 17 bp, synthetic construct
  source 1..17: mol_type = other DNA
gccagggatgcgccccc

SEQ ID NO: 180681 - DNA, 17 bp, synthetic construct
  source 1..17: mol_type = other DNA
ggccagggatgcgcccc

SEQ ID NO: 180682 - DNA, 17 bp, synthetic construct
  source 1..17: mol_type = other DNA
tggccagggatgcgccc

SEQ ID NO: 180683 - DNA, 17 bp, synthetic construct
  source 1..17: mol_type = other DNA
gtggccagggatgcgcc

SEQ ID NO: 180684 - DNA, 17 bp, synthetic construct
  source 1..17: mol_type = other DNA
cgtggccagggatgcgc

SEQ ID NO: 180685 - DNA, 17 bp, synthetic construct
  source 1..17: mol_type = other DNA
gcgtggccagggatgcg

SEQ ID NO: 180686 - DNA, 17 bp, synthetic construct
  source 1..17: mol_type = other DNA
ggcgtggccagggatgc

SEQ ID NO: 180687 - DNA, 17 bp, synthetic construct
  source 1..17: mol_type = other DNA
aggcgtggccagggatg

SEQ ID NO: 180688 - DNA, 17 bp, synthetic construct
  source 1..17: mol_type = other DNA
caggcgtggccagggat

SEQ ID NO: 180689 - DNA, 17 bp, synthetic construct
  source 1..17: mol_type = other DNA
ccaggcgtggccaggga

SEQ ID NO: 180690 - DNA, 17 bp, synthetic construct
  source 1..17: mol_type = other DNA
gccaggcgtggccaggg

SEQ ID NO: 180691 - DNA, 17 bp, synthetic construct
  source 1..17: mol_type = other DNA
ggccaggcgtggccagg

SEQ ID NO: 180692 - DNA, 17 bp, synthetic construct
  source 1..17: mol_type = other DNA
gggccaggcgtggccag

SEQ ID NO: 180693 - DNA, 17 bp, synthetic construct
  source 1..17: mol_type = other DNA
ggggccaggcgtggcca

SEQ ID NO: 180694 - DNA, 17 bp, synthetic construct
  source 1..17: mol_type = other DNA
cggggccaggcgtggcc

SEQ ID NO: 180695 - DNA, 17 bp, synthetic construct
  source 1..17: mol_type = other DNA
gcggggccaggcgtggc

SEQ ID NO: 180696 - DNA, 17 bp, synthetic construct
  source 1..17: mol_type = other DNA
tgcggggccaggcgtgg

SEQ ID NO: 180697 - DNA, 17 bp, synthetic construct
  source 1..17: mol_type = other DNA
atgcggggccaggcgtg

SEQ ID NO: 180698 - DNA, 17 bp, synthetic construct
  source 1..17: mol_type = other DNA
gatgcggggccaggcgt

SEQ ID NO: 180699 - DNA, 17 bp, synthetic construct
  source 1..17: mol_type = other DNA
ggatgcggggccaggcg

SEQ ID NO: 180700 - DNA, 17 bp, synthetic construct
  source 1..17: mol_type = other DNA
gggatgcggggccaggc

SEQ ID NO: 180701 - DNA, 17 bp, synthetic construct
  source 1..17: mol_type = other DNA
ggggatgcggggccagg

SEQ ID NO: 180702 - DNA, 17 bp, synthetic construct
  source 1..17: mol_type = other DNA
tggggatgcggggccag

SEQ ID NO: 180703 - DNA, 17 bp, synthetic construct
  source 1..17: mol_type = other DNA
gtggggatgcggggcca

SEQ ID NO: 180704 - DNA, 17 bp, synthetic construct
  source 1..17: mol_type = other DNA
ggtggggatgcggggcc

SEQ ID NO: 180705 - DNA, 17 bp, synthetic construct
  source 1..17: mol_type = other DNA
aggtggggatgcggggc

SEQ ID NO: 180706 - DNA, 17 bp, synthetic construct
  source 1..17: mol_type = other DNA
caggtggggatgcgggg

SEQ ID NO: 180707 - DNA, 17 bp, synthetic construct
  source 1..17: mol_type = other DNA
ccaggtggggatgcggg

SEQ ID NO: 180708 - DNA, 17 bp, synthetic construct
  source 1..17: mol_type = other DNA
gccaggtggggatgcgg

SEQ ID NO: 180709 - DNA, 17 bp, synthetic construct
  source 1..17: mol_type = other DNA
ggccaggtggggatgcg

SEQ ID NO: 180710 - DNA, 17 bp, synthetic construct
  source 1..17: mol_type = other DNA
gggccaggtggggatgc

SEQ ID NO: 180711 - DNA, 17 bp, synthetic construct
  source 1..17: mol_type = other DNA
ggggccaggtggggatg

SEQ ID NO: 180712 - DNA, 17 bp, synthetic construct
  source 1..17: mol_type = other DNA
cggggccaggtggggat

SEQ ID NO: 180713 - DNA, 17 bp, synthetic construct
  source 1..17: mol_type = other DNA
gcggggccaggtgggga

SEQ ID NO: 180714 - DNA, 17 bp, synthetic construct
  source 1..17: mol_type = other DNA
ggcggggccaggtgggg

SEQ ID NO: 180715 - DNA, 17 bp, synthetic construct
  source 1..17: mol_type = other DNA
tggcggggccaggtggg

SEQ ID NO: 180716 - DNA, 17 bp, synthetic construct
  source 1..17: mol_type = other DNA
gtggcggggccaggtgg

SEQ ID NO: 180717 - DNA, 17 bp, synthetic construct
  source 1..17: mol_type = other DNA
ggtggcggggccaggtg

SEQ ID NO: 180718 - DNA, 17 bp, synthetic construct
  source 1..17: mol_type = other DNA
cggtggcggggccaggt

SEQ ID NO: 180719 - DNA, 17 bp, synthetic construct
  source 1..17: mol_type = other DNA
tcggtggcggggccagg

SEQ ID NO: 180720 - DNA, 17 bp, synthetic construct
  source 1..17: mol_type = other DNA
ctcggtggcggggccag

SEQ ID NO: 180721 - DNA, 17 bp, synthetic construct
  source 1..17: mol_type = other DNA
gctcggtggcggggcca

SEQ ID NO: 180722 - DNA, 17 bp, synthetic construct
  source 1..17: mol_type = other DNA
ggctcggtggcggggcc

SEQ ID NO: 180723 - DNA, 17 bp, synthetic construct
  source 1..17: mol_type = other DNA
gggctcggtggcggggc

SEQ ID NO: 180724 - DNA, 17 bp, synthetic construct
  source 1..17: mol_type = other DNA
ggggctcggtggcgggg

SEQ ID NO: 180725 - DNA, 17 bp, synthetic construct
  source 1..17: mol_type = other DNA
tggggctcggtggcggg

SEQ ID NO: 180726 - DNA, 17 bp, synthetic construct
  source 1..17: mol_type = other DNA
gtggggctcggtggcgg

SEQ ID NO: 180727 - DNA, 17 bp, synthetic construct
  source 1..17: mol_type = other DNA
ggtggggctcggtggcg

SEQ ID NO: 180728 - DNA, 17 bp, synthetic construct
  source 1..17: mol_type = other DNA
gggtggggctcggtggc

SEQ ID NO: 180729 - DNA, 17 bp, synthetic construct
  source 1..17: mol_type = other DNA
tgggtggggctcggtgg

SEQ ID NO: 180730 - DNA, 17 bp, synthetic construct
  source 1..17: mol_type = other DNA
atgggtggggctcggtg

SEQ ID NO: 180731 - DNA, 17 bp, synthetic construct
  source 1..17: mol_type = other DNA
gatgggtggggctcggt

SEQ ID NO: 180732 - DNA, 17 bp, synthetic construct
  source 1..17: mol_type = other DNA
ggatgggtggggctcgg

SEQ ID NO: 180733 - DNA, 17 bp, synthetic construct
  source 1..17: mol_type = other DNA
gggatgggtggggctcg

SEQ ID NO: 180734 - DNA, 17 bp, synthetic construct
  source 1..17: mol_type = other DNA
ggggatgggtggggctc

SEQ ID NO: 180735 - DNA, 17 bp, synthetic construct
  source 1..17: mol_type = other DNA
cggggatgggtggggct

SEQ ID NO: 180736 - DNA, 17 bp, synthetic construct
  source 1..17: mol_type = other DNA
gcggggatgggtggggc

SEQ ID NO: 180737 - DNA, 17 bp, synthetic construct
  source 1..17: mol_type = other DNA
ggcggggatgggtgggg

SEQ ID NO: 180738 - DNA, 17 bp, synthetic construct
  source 1..17: mol_type = other DNA
gggcggggatgggtggg

SEQ ID NO: 180739 - DNA, 17 bp, synthetic construct
  source 1..17: mol_type = other DNA
tgggcggggatgggtgg

SEQ ID NO: 180740 - DNA, 17 bp, synthetic construct
  source 1..17: mol_type = other DNA
atgggcggggatgggtg

SEQ ID NO: 180741 - DNA, 17 bp, synthetic construct
  source 1..17: mol_type = other DNA
tatgggcggggatgggt

SEQ ID NO: 180742 - DNA, 17 bp, synthetic construct
  source 1..17: mol_type = other DNA
gtatgggcggggatggg

SEQ ID NO: 180743 - DNA, 17 bp, synthetic construct
  source 1..17: mol_type = other DNA
agtatgggcggggatgg

SEQ ID NO: 180744 - DNA, 17 bp, synthetic construct
  source 1..17: mol_type = other DNA
aagtatgggcggggatg

SEQ ID NO: 180745 - DNA, 17 bp, synthetic construct
  source 1..17: mol_type = other DNA
taagtatgggcggggat

SEQ ID NO: 180746 - DNA, 17 bp, synthetic construct
  source 1..17: mol_type = other DNA
ctaagtatgggcgggga

SEQ ID NO: 180747 - DNA, 17 bp, synthetic construct
  source 1..17: mol_type = other DNA
gctaagtatgggcgggg

SEQ ID NO: 180748 - DNA, 17 bp, synthetic construct
  source 1..17: mol_type = other DNA
ggctaagtatgggcggg

SEQ ID NO: 180749 - DNA, 17 bp, synthetic construct
  source 1..17: mol_type = other DNA
gggctaagtatgggcgg

SEQ ID NO: 180750 - DNA, 17 bp, synthetic construct
  source 1..17: mol_type = other DNA
ggggctaagtatgggcg

SEQ ID NO: 180751 - DNA, 17 bp, synthetic construct
  source 1..17: mol_type = other DNA
cggggctaagtatgggc

SEQ ID NO: 180752 - DNA, 17 bp, synthetic construct
  source 1..17: mol_type = other DNA
gcggggctaagtatggg

SEQ ID NO: 180753 - DNA, 17 bp, synthetic construct
  source 1..17: mol_type = other DNA
ggcggggctaagtatgg

SEQ ID NO: 180754 - DNA, 17 bp, synthetic construct
  source 1..17: mol_type = other DNA
gggcggggctaagtatg

SEQ ID NO: 180755 - DNA, 17 bp, synthetic construct
  source 1..17: mol_type = other DNA
tgggcggggctaagtat

SEQ ID NO: 180756 - DNA, 17 bp, synthetic construct
  source 1..17: mol_type = other DNA
gtgggcggggctaagta

SEQ ID NO: 180757 - DNA, 17 bp, synthetic construct
  source 1..17: mol_type = other DNA
ggtgggcggggctaagt

SEQ ID NO: 180758 - DNA, 17 bp, synthetic construct
  source 1..17: mol_type = other DNA
gggtgggcggggctaag

SEQ ID NO: 180759 - DNA, 17 bp, synthetic construct
  source 1..17: mol_type = other DNA
ggggtgggcggggctaa

SEQ ID NO: 180760 - DNA, 17 bp, synthetic construct
  source 1..17: mol_type = other DNA
gggggtgggcggggcta

SEQ ID NO: 180761 - DNA, 17 bp, synthetic construct
  source 1..17: mol_type = other DNA
tgggggtgggcggggct

SEQ ID NO: 180762 - DNA, 17 bp, synthetic construct
  source 1..17: mol_type = other DNA
gtgggggtgggcggggc

SEQ ID NO: 180763 - DNA, 17 bp, synthetic construct
  source 1..17: mol_type = other DNA
ggtgggggtgggcgggg

SEQ ID NO: 180764 - DNA, 17 bp, synthetic construct
  source 1..17: mol_type = other DNA
gggtgggggtgggcggg

SEQ ID NO: 180765 - DNA, 17 bp, synthetic construct
  source 1..17: mol_type = other DNA
ggggtgggggtgggcgg

SEQ ID NO: 180766 - DNA, 17 bp, synthetic construct
  source 1..17: mol_type = other DNA
tggggtgggggtgggcg

SEQ ID NO: 180767 - DNA, 17 bp, synthetic construct
  source 1..17: mol_type = other DNA
ctggggtgggggtgggc

SEQ ID NO: 180768 - DNA, 17 bp, synthetic construct
  source 1..17: mol_type = other DNA
gctggggtgggggtggg

SEQ ID NO: 180769 - DNA, 17 bp, synthetic construct
  source 1..17: mol_type = other DNA
ggctggggtgggggtgg

SEQ ID NO: 180770 - DNA, 17 bp, synthetic construct
  source 1..17: mol_type = other DNA
gggctggggtgggggtg

SEQ ID NO: 180771 - DNA, 17 bp, synthetic construct
  source 1..17: mol_type = other DNA
ggggctggggtgggggt

SEQ ID NO: 180772 - DNA, 17 bp, synthetic construct
  source 1..17: mol_type = other DNA
tggggctggggtggggg

SEQ ID NO: 180773 - DNA, 17 bp, synthetic construct
  source 1..17: mol_type = other DNA
gtggggctggggtgggg

SEQ ID NO: 180774 - DNA, 17 bp, synthetic construct
  source 1..17: mol_type = other DNA
ggtggggctggggtggg

SEQ ID NO: 180775 - DNA, 17 bp, synthetic construct
  source 1..17: mol_type = other DNA
gggtggggctggggtgg

SEQ ID NO: 180776 - DNA, 17 bp, synthetic construct
  source 1..17: mol_type = other DNA
cgggtggggctggggtg

SEQ ID NO: 180777 - DNA, 17 bp, synthetic construct
  source 1..17: mol_type = other DNA
acgggtggggctggggt

SEQ ID NO: 180778 - DNA, 17 bp, synthetic construct
  source 1..17: mol_type = other DNA
gacgggtggggctgggg

SEQ ID NO: 180779 - DNA, 17 bp, synthetic construct
  source 1..17: mol_type = other DNA
ggacgggtggggctggg

SEQ ID NO: 180780 - DNA, 17 bp, synthetic construct
  source 1..17: mol_type = other DNA
gggacgggtggggctgg

SEQ ID NO: 180781 - DNA, 17 bp, synthetic construct
  source 1..17: mol_type = other DNA
ggggacgggtggggctg

SEQ ID NO: 180782 - DNA, 17 bp, synthetic construct
  source 1..17: mol_type = other DNA
cggggacgggtggggct

SEQ ID NO: 180783 - DNA, 17 bp, synthetic construct
  source 1..17: mol_type = other DNA
gcggggacgggtggggc

SEQ ID NO: 180784 - DNA, 17 bp, synthetic construct
  source 1..17: mol_type = other DNA
ggcggggacgggtgggg

SEQ ID NO: 180785 - DNA, 17 bp, synthetic construct
  source 1..17: mol_type = other DNA
gggcggggacgggtggg

SEQ ID NO: 180786 - DNA, 17 bp, synthetic construct
  source 1..17: mol_type = other DNA
ggggcggggacgggtgg

SEQ ID NO: 180787 - DNA, 17 bp, synthetic construct
  source 1..17: mol_type = other DNA
gggggcggggacgggtg

SEQ ID NO: 180788 - DNA, 17 bp, synthetic construct
  source 1..17: mol_type = other DNA
tgggggcggggacgggt

SEQ ID NO: 180789 - DNA, 17 bp, synthetic construct
  source 1..17: mol_type = other DNA
ctgggggcggggacggg

SEQ ID NO: 180790 - DNA, 17 bp, synthetic construct
  source 1..17: mol_type = other DNA
gctgggggcggggacgg

SEQ ID NO: 180791 - DNA, 17 bp, synthetic construct
  source 1..17: mol_type = other DNA
ggctgggggcggggacg

SEQ ID NO: 180792 - DNA, 17 bp, synthetic construct
  source 1..17: mol_type = other DNA
gggctgggggcggggac

SEQ ID NO: 180793 - DNA, 17 bp, synthetic construct
  source 1..17: mol_type = other DNA
ggggctgggggcgggga

SEQ ID NO: 180794 - DNA, 17 bp, synthetic construct
  source 1..17: mol_type = other DNA
cggggctgggggcgggg

SEQ ID NO: 180795 - DNA, 17 bp, synthetic construct
  source 1..17: mol_type = other DNA
gcggggctgggggcggg

SEQ ID NO: 180796 - DNA, 17 bp, synthetic construct
  source 1..17: mol_type = other DNA
ggcggggctgggggcgg

SEQ ID NO: 180797 - DNA, 17 bp, synthetic construct
  source 1..17: mol_type = other DNA
gggcggggctgggggcg

SEQ ID NO: 180798 - DNA, 17 bp, synthetic construct
  source 1..17: mol_type = other DNA
tgggcggggctgggggc

SEQ ID NO: 180799 - DNA, 17 bp, synthetic construct
  source 1..17: mol_type = other DNA
gtgggcggggctggggg

SEQ ID NO: 180800 - DNA, 17 bp, synthetic construct
  source 1..17: mol_type = other DNA
ggtgggcggggctgggg

SEQ ID NO: 180801 - DNA, 17 bp, synthetic construct
  source 1..17: mol_type = other DNA
gggtgggcggggctggg

SEQ ID NO: 180802 - DNA, 17 bp, synthetic construct
  source 1..17: mol_type = other DNA
agggtgggcggggctgg

SEQ ID NO: 180803 - DNA, 17 bp, synthetic construct
  source 1..17: mol_type = other DNA
cagggtgggcggggctg

SEQ ID NO: 180804 - DNA, 17 bp, synthetic construct
  source 1..17: mol_type = other DNA
tcagggtgggcggggct

SEQ ID NO: 180805 - DNA, 17 bp, synthetic construct
  source 1..17: mol_type = other DNA
ctcagggtgggcggggc

SEQ ID NO: 180806 - DNA, 17 bp, synthetic construct
  source 1..17: mol_type = other DNA
gctcagggtgggcgggg

SEQ ID NO: 180807 - DNA, 17 bp, synthetic construct
  source 1..17: mol_type = other DNA
ggctcagggtgggcggg

SEQ ID NO: 180808 - DNA, 17 bp, synthetic construct
  source 1..17: mol_type = other DNA
gggctcagggtgggcgg

SEQ ID NO: 180809 - DNA, 17 bp, synthetic construct
  source 1..17: mol_type = other DNA
ggggctcagggtgggcg

SEQ ID NO: 180810 - DNA, 17 bp, synthetic construct
  source 1..17: mol_type = other DNA
cggggctcagggtgggc

SEQ ID NO: 180811 - DNA, 17 bp, synthetic construct
  source 1..17: mol_type = other DNA
gcggggctcagggtggg

SEQ ID NO: 180812 - DNA, 17 bp, synthetic construct
  source 1..17: mol_type = other DNA
tgcggggctcagggtgg

SEQ ID NO: 180813 - DNA, 17 bp, synthetic construct
  source 1..17: mol_type = other DNA
gtgcggggctcagggtg

SEQ ID NO: 180814 - DNA, 17 bp, synthetic construct
  source 1..17: mol_type = other DNA
agtgcggggctcagggt

SEQ ID NO: 180815 - DNA, 17 bp, synthetic construct
  source 1..17: mol_type = other DNA
gagtgcggggctcaggg

SEQ ID NO: 180816 - DNA, 17 bp, synthetic construct
  source 1..17: mol_type = other DNA
ggagtgcggggctcagg

SEQ ID NO: 180817 - DNA, 17 bp, synthetic construct
  source 1..17: mol_type = other DNA
tggagtgcggggctcag

SEQ ID NO: 180818 - DNA, 17 bp, synthetic construct
  source 1..17: mol_type = other DNA
gtggagtgcggggctca

SEQ ID NO: 180819 - DNA, 17 bp, synthetic construct
  source 1..17: mol_type = other DNA
ggtggagtgcggggctc

SEQ ID NO: 180820 - DNA, 17 bp, synthetic construct
  source 1..17: mol_type = other DNA
gggtggagtgcggggct

SEQ ID NO: 180821 - DNA, 17 bp, synthetic construct
  source 1..17: mol_type = other DNA
tgggtggagtgcggggc

SEQ ID NO: 180822 - DNA, 17 bp, synthetic construct
  source 1..17: mol_type = other DNA
atgggtggagtgcgggg

SEQ ID NO: 180823 - DNA, 17 bp, synthetic construct
  source 1..17: mol_type = other DNA
aatgggtggagtgcggg

SEQ ID NO: 180824 - DNA, 17 bp, synthetic construct
  source 1..17: mol_type = other DNA
gaatgggtggagtgcgg

SEQ ID NO: 180825 - DNA, 17 bp, synthetic construct
  source 1..17: mol_type = other DNA
tgaatgggtggagtgcg

SEQ ID NO: 180826 - DNA, 17 bp, synthetic construct
  source 1..17: mol_type = other DNA
atgaatgggtggagtgc

SEQ ID NO: 180827 - DNA, 17 bp, synthetic construct
  source 1..17: mol_type = other DNA
gatgaatgggtggagtg

SEQ ID NO: 180828 - DNA, 17 bp, synthetic construct
  source 1..17: mol_type = other DNA
agatgaatgggtggagt

SEQ ID NO: 180829 - DNA, 17 bp, synthetic construct
  source 1..17: mol_type = other DNA
gagatgaatgggtggag

SEQ ID NO: 180830 - DNA, 17 bp, synthetic construct
  source 1..17: mol_type = other DNA
ggagatgaatgggtgga

SEQ ID NO: 180831 - DNA, 17 bp, synthetic construct
  source 1..17: mol_type = other DNA
aggagatgaatgggtgg

SEQ ID NO: 180832 - DNA, 17 bp, synthetic construct
  source 1..17: mol_type = other DNA
aaggagatgaatgggtg

SEQ ID NO: 180833 - DNA, 17 bp, synthetic construct
  source 1..17: mol_type = other DNA
gaaggagatgaatgggt

SEQ ID NO: 180834 - DNA, 17 bp, synthetic construct
  source 1..17: mol_type = other DNA
ggaaggagatgaatggg

SEQ ID NO: 180835 - DNA, 17 bp, synthetic construct
  source 1..17: mol_type = other DNA
gggaaggagatgaatgg

SEQ ID NO: 180836 - DNA, 17 bp, synthetic construct
  source 1..17: mol_type = other DNA
agggaaggagatgaatg

SEQ ID NO: 180837 - DNA, 17 bp, synthetic construct
  source 1..17: mol_type = other DNA
cagggaaggagatgaat

SEQ ID NO: 180838 - DNA, 17 bp, synthetic construct
  source 1..17: mol_type = other DNA
gcagggaaggagatgaa

SEQ ID NO: 180839 - DNA, 17 bp, synthetic construct
  source 1..17: mol_type = other DNA
agcagggaaggagatga

SEQ ID NO: 180840 - DNA, 17 bp, synthetic construct
  source 1..17: mol_type = other DNA
gagcagggaaggagatg

SEQ ID NO: 180841 - DNA, 17 bp, synthetic construct
  source 1..17: mol_type = other DNA
ggagcagggaaggagat

SEQ ID NO: 180842 - DNA, 17 bp, synthetic construct
  source 1..17: mol_type = other DNA
gggagcagggaaggaga

SEQ ID NO: 180843 - DNA, 17 bp, synthetic construct
  source 1..17: mol_type = other DNA
ggggagcagggaaggag

SEQ ID NO: 180844 - DNA, 17 bp, synthetic construct
  source 1..17: mol_type = other DNA
tggggagcagggaagga

SEQ ID NO: 180845 - DNA, 17 bp, synthetic construct
  source 1..17: mol_type = other DNA
gtggggagcagggaagg

SEQ ID NO: 180846 - DNA, 17 bp, synthetic construct
  source 1..17: mol_type = other DNA
agtggggagcagggaag

SEQ ID NO: 180847 - DNA, 17 bp, synthetic construct
  source 1..17: mol_type = other DNA
cagtggggagcagggaa

SEQ ID NO: 180848 - DNA, 17 bp, synthetic construct
  source 1..17: mol_type = other DNA
gcagtggggagcaggga

SEQ ID NO: 180849 - DNA, 17 bp, synthetic construct
  source 1..17: mol_type = other DNA
ggcagtggggagcaggg

SEQ ID NO: 180850 - DNA, 17 bp, synthetic construct
  source 1..17: mol_type = other DNA
gggcagtggggagcagg

SEQ ID NO: 180851 - DNA, 17 bp, synthetic construct
  source 1..17: mol_type = other DNA
tgggcagtggggagcag

SEQ ID NO: 180852 - DNA, 17 bp, synthetic construct
  source 1..17: mol_type = other DNA
atgggcagtggggagca

SEQ ID NO: 180853 - DNA, 17 bp, synthetic construct
  source 1..17: mol_type = other DNA
gatgggcagtggggagc

SEQ ID NO: 180854 - DNA, 17 bp, synthetic construct
  source 1..17: mol_type = other DNA
ggatgggcagtggggag

SEQ ID NO: 180855 - DNA, 17 bp, synthetic construct
  source 1..17: mol_type = other DNA
aggatgggcagtgggga

SEQ ID NO: 180856 - DNA, 17 bp, synthetic construct
  source 1..17: mol_type = other DNA
caggatgggcagtgggg

SEQ ID NO: 180857 - DNA, 17 bp, synthetic construct
  source 1..17: mol_type = other DNA
ccaggatgggcagtggg

SEQ ID NO: 180858 - DNA, 17 bp, synthetic construct
  source 1..17: mol_type = other DNA
cccaggatgggcagtgg

SEQ ID NO: 180859 - DNA, 17 bp, synthetic construct
  source 1..17: mol_type = other DNA
ccccaggatgggcagtg

SEQ ID NO: 180860 - DNA, 17 bp, synthetic construct
  source 1..17: mol_type = other DNA
tccccaggatgggcagt

SEQ ID NO: 180861 - DNA, 17 bp, synthetic construct
  source 1..17: mol_type = other DNA
gtccccaggatgggcag

SEQ ID NO: 180862 - DNA, 17 bp, synthetic construct
  source 1..17: mol_type = other DNA
agtccccaggatgggca

SEQ ID NO: 180863 - DNA, 17 bp, synthetic construct
  source 1..17: mol_type = other DNA
gagtccccaggatgggc

SEQ ID NO: 180864 - DNA, 17 bp, synthetic construct
  source 1..17: mol_type = other DNA
tgagtccccaggatggg

SEQ ID NO: 180865 - DNA, 17 bp, synthetic construct
  source 1..17: mol_type = other DNA
gtgagtccccaggatgg

SEQ ID NO: 180866 - DNA, 17 bp, synthetic construct
  source 1..17: mol_type = other DNA
cgtgagtccccaggatg

SEQ ID NO: 180867 - DNA, 17 bp, synthetic construct
  source 1..17: mol_type = other DNA
acgtgagtccccaggat

SEQ ID NO: 180868 - DNA, 17 bp, synthetic construct
  source 1..17: mol_type = other DNA
cacgtgagtccccagga

SEQ ID NO: 180869 - DNA, 17 bp, synthetic construct
  source 1..17: mol_type = other DNA
ccacgtgagtccccagg

SEQ ID NO: 180870 - DNA, 17 bp, synthetic construct
  source 1..17: mol_type = other DNA
tccacgtgagtccccag

SEQ ID NO: 180871 - DNA, 17 bp, synthetic construct
  source 1..17: mol_type = other DNA
atccacgtgagtcccca

SEQ ID NO: 180872 - DNA, 17 bp, synthetic construct
  source 1..17: mol_type = other DNA
catccacgtgagtcccc

SEQ ID NO: 180873 - DNA, 17 bp, synthetic construct
  source 1..17: mol_type = other DNA
tcatccacgtgagtccc

SEQ ID NO: 180874 - DNA, 17 bp, synthetic construct
  source 1..17: mol_type = other DNA
gtcatccacgtgagtcc

SEQ ID NO: 180875 - DNA, 17 bp, synthetic construct
  source 1..17: mol_type = other DNA
tgtcatccacgtgagtc

SEQ ID NO: 180876 - DNA, 17 bp, synthetic construct
  source 1..17: mol_type = other DNA
ctgtcatccacgtgagt

SEQ ID NO: 180877 - DNA, 17 bp, synthetic construct
  source 1..17: mol_type = other DNA
actgtcatccacgtgag

SEQ ID NO: 180878 - DNA, 17 bp, synthetic construct
  source 1..17: mol_type = other DNA
cactgtcatccacgtga

SEQ ID NO: 180879 - DNA, 17 bp, synthetic construct
  source 1..17: mol_type = other DNA
ccactgtcatccacgtg

SEQ ID NO: 180880 - DNA, 17 bp, synthetic construct
  source 1..17: mol_type = other DNA
tccactgtcatccacgt

SEQ ID NO: 180881 - DNA, 17 bp, synthetic construct
  source 1..17: mol_type = other DNA
ctccactgtcatccacg

SEQ ID NO: 180882 - DNA, 17 bp, synthetic construct
  source 1..17: mol_type = other DNA
cctccactgtcatccac

SEQ ID NO: 180883 - DNA, 17 bp, synthetic construct
  source 1..17: mol_type = other DNA
gcctccactgtcatcca

SEQ ID NO: 180884 - DNA, 17 bp, synthetic construct
  source 1..17: mol_type = other DNA
ggcctccactgtcatcc

SEQ ID NO: 180885 - DNA, 17 bp, synthetic construct
  source 1..17: mol_type = other DNA
aggcctccactgtcatc

SEQ ID NO: 180886 - DNA, 17 bp, synthetic construct
  source 1..17: mol_type = other DNA
gaggcctccactgtcat

SEQ ID NO: 180887 - DNA, 17 bp, synthetic construct
  source 1..17: mol_type = other DNA
ggaggcctccactgtca

SEQ ID NO: 180888 - DNA, 17 bp, synthetic construct
  source 1..17: mol_type = other DNA
aggaggcctccactgtc

SEQ ID NO: 180889 - DNA, 17 bp, synthetic construct
  source 1..17: mol_type = other DNA
caggaggcctccactgt

SEQ ID NO: 180890 - DNA, 17 bp, synthetic construct
  source 1..17: mol_type = other DNA
ccaggaggcctccactg

SEQ ID NO: 180891 - DNA, 17 bp, synthetic construct
  source 1..17: mol_type = other DNA
tccaggaggcctccact

SEQ ID NO: 180892 - DNA, 17 bp, synthetic construct
  source 1..17: mol_type = other DNA
atccaggaggcctccac

SEQ ID NO: 180893 - DNA, 17 bp, synthetic construct
  source 1..17: mol_type = other DNA
gatccaggaggcctcca

SEQ ID NO: 180894 - DNA, 17 bp, synthetic construct
  source 1..17: mol_type = other DNA
agatccaggaggcctcc

SEQ ID NO: 180895 - DNA, 17 bp, synthetic construct
  source 1..17: mol_type = other DNA
gagatccaggaggcctc

SEQ ID NO: 180896 - DNA, 17 bp, synthetic construct
  source 1..17: mol_type = other DNA
agagatccaggaggcct

SEQ ID NO: 180897 - DNA, 17 bp, synthetic construct
  source 1..17: mol_type = other DNA
tagagatccaggaggcc

SEQ ID NO: 180898 - DNA, 17 bp, synthetic construct
  source 1..17: mol_type = other DNA
ctagagatccaggaggc

SEQ ID NO: 180899 - DNA, 17 bp, synthetic construct
  source 1..17: mol_type = other DNA
cctagagatccaggagg

SEQ ID NO: 180900 - DNA, 17 bp, synthetic construct
  source 1..17: mol_type = other DNA
acctagagatccaggag

SEQ ID NO: 180901 - DNA, 17 bp, synthetic construct
  source 1..17: mol_type = other DNA
gacctagagatccagga

SEQ ID NO: 180902 - DNA, 17 bp, synthetic construct
  source 1..17: mol_type = other DNA
agacctagagatccagg

SEQ ID NO: 180903 - DNA, 17 bp, synthetic construct
  source 1..17: mol_type = other DNA
gagacctagagatccag

SEQ ID NO: 180904 - DNA, 17 bp, synthetic construct
  source 1..17: mol_type = other DNA
tgagacctagagatcca

SEQ ID NO: 180905 - DNA, 17 bp, synthetic construct
  source 1..17: mol_type = other DNA
ctgagacctagagatcc

SEQ ID NO: 180906 - DNA, 17 bp, synthetic construct
  source 1..17: mol_type = other DNA
cctgagacctagagatc

SEQ ID NO: 180907 - DNA, 17 bp, synthetic construct
  source 1..17: mol_type = other DNA
ccctgagacctagagat

SEQ ID NO: 180908 - DNA, 17 bp, synthetic construct
  source 1..17: mol_type = other DNA
gccctgagacctagaga

SEQ ID NO: 180909 - DNA, 17 bp, synthetic construct
  source 1..17: mol_type = other DNA
ggccctgagacctagag

SEQ ID NO: 180910 - DNA, 17 bp, synthetic construct
  source 1..17: mol_type = other DNA
aggccctgagacctaga

SEQ ID NO: 180911 - DNA, 17 bp, synthetic construct
  source 1..17: mol_type = other DNA
gaggccctgagacctag

SEQ ID NO: 180912 - DNA, 17 bp, synthetic construct
  source 1..17: mol_type = other DNA
agaggccctgagaccta

SEQ ID NO: 180913 - DNA, 17 bp, synthetic construct
  source 1..17: mol_type = other DNA
gagaggccctgagacct

SEQ ID NO: 180914 - DNA, 17 bp, synthetic construct
  source 1..17: mol_type = other DNA
agagaggccctgagacc

SEQ ID NO: 180915 - DNA, 17 bp, synthetic construct
  source 1..17: mol_type = other DNA
aagagaggccctgagac

SEQ ID NO: 180916 - DNA, 17 bp, synthetic construct
  source 1..17: mol_type = other DNA
caagagaggccctgaga

SEQ ID NO: 180917 - DNA, 17 bp, synthetic construct
  source 1..17: mol_type = other DNA
acaagagaggccctgag

SEQ ID NO: 180918 - DNA, 17 bp, synthetic construct
  source 1..17: mol_type = other DNA
gacaagagaggccctga

SEQ ID NO: 180919 - DNA, 17 bp, synthetic construct
  source 1..17: mol_type = other DNA
tgacaagagaggccctg

SEQ ID NO: 180920 - DNA, 17 bp, synthetic construct
  source 1..17: mol_type = other DNA
atgacaagagaggccct

SEQ ID NO: 180921 - DNA, 17 bp, synthetic construct
  source 1..17: mol_type = other DNA
gatgacaagagaggccc

SEQ ID NO: 180922 - DNA, 17 bp, synthetic construct
  source 1..17: mol_type = other DNA
ggatgacaagagaggcc

SEQ ID NO: 180923 - DNA, 17 bp, synthetic construct
  source 1..17: mol_type = other DNA
aggatgacaagagaggc

SEQ ID NO: 180924 - DNA, 17 bp, synthetic construct
  source 1..17: mol_type = other DNA
caggatgacaagagagg

SEQ ID NO: 180925 - DNA, 17 bp, synthetic construct
  source 1..17: mol_type = other DNA
gcaggatgacaagagag

SEQ ID NO: 180926 - DNA, 17 bp, synthetic construct
  source 1..17: mol_type = other DNA
tgcaggatgacaagaga

SEQ ID NO: 180927 - DNA, 17 bp, synthetic construct
  source 1..17: mol_type = other DNA
ctgcaggatgacaagag

SEQ ID NO: 180928 - DNA, 17 bp, synthetic construct
  source 1..17: mol_type = other DNA
cctgcaggatgacaaga

SEQ ID NO: 180929 - DNA, 17 bp, synthetic construct
  source 1..17: mol_type = other DNA
tcctgcaggatgacaag

SEQ ID NO: 180930 - DNA, 17 bp, synthetic construct
  source 1..17: mol_type = other DNA
ttcctgcaggatgacaa

SEQ ID NO: 180931 - DNA, 17 bp, synthetic construct
  source 1..17: mol_type = other DNA
gttcctgcaggatgaca

SEQ ID NO: 180932 - DNA, 17 bp, synthetic construct
  source 1..17: mol_type = other DNA
ggttcctgcaggatgac

SEQ ID NO: 180933 - DNA, 17 bp, synthetic construct
  source 1..17: mol_type = other DNA
tggttcctgcaggatga

SEQ ID NO: 180934 - DNA, 17 bp, synthetic construct
  source 1..17: mol_type = other DNA
ctggttcctgcaggatg

SEQ ID NO: 180935 - DNA, 17 bp, synthetic construct
  source 1..17: mol_type = other DNA
tctggttcctgcaggat

SEQ ID NO: 180936 - DNA, 17 bp, synthetic construct
  source 1..17: mol_type = other DNA
ctctggttcctgcagga

SEQ ID NO: 180937 - DNA, 17 bp, synthetic construct
  source 1..17: mol_type = other DNA
gctctggttcctgcagg

SEQ ID NO: 180938 - DNA, 17 bp, synthetic construct
  source 1..17: mol_type = other DNA
ggctctggttcctgcag

SEQ ID NO: 180939 - DNA, 17 bp, synthetic construct
  source 1..17: mol_type = other DNA
gggctctggttcctgca

SEQ ID NO: 180940 - DNA, 17 bp, synthetic construct
  source 1..17: mol_type = other DNA
tgggctctggttcctgc

SEQ ID NO: 180941 - DNA, 17 bp, synthetic construct
  source 1..17: mol_type = other DNA
gtgggctctggttcctg

SEQ ID NO: 180942 - DNA, 17 bp, synthetic construct
  source 1..17: mol_type = other DNA
tgtgggctctggttcct

SEQ ID NO: 180943 - DNA, 17 bp, synthetic construct
  source 1..17: mol_type = other DNA
ctgtgggctctggttcc

SEQ ID NO: 180944 - DNA, 17 bp, synthetic construct
  source 1..17: mol_type = other DNA
gctgtgggctctggttc

SEQ ID NO: 180945 - DNA, 17 bp, synthetic construct
  source 1..17: mol_type = other DNA
agctgtgggctctggtt

SEQ ID NO: 180946 - DNA, 17 bp, synthetic construct
  source 1..17: mol_type = other DNA
cagctgtgggctctggt

SEQ ID NO: 180947 - DNA, 17 bp, synthetic construct
  source 1..17: mol_type = other DNA
ccagctgtgggctctgg

SEQ ID NO: 180948 - DNA, 17 bp, synthetic construct
  source 1..17: mol_type = other DNA
tccagctgtgggctctg

SEQ ID NO: 180949 - DNA, 17 bp, synthetic construct
  source 1..17: mol_type = other DNA
ctccagctgtgggctct

SEQ ID NO: 180950 - DNA, 17 bp, synthetic construct
  source 1..17: mol_type = other DNA
cctccagctgtgggctc

SEQ ID NO: 180951 - DNA, 17 bp, synthetic construct
  source 1..17: mol_type = other DNA
ccctccagctgtgggct

SEQ ID NO: 180952 - DNA, 17 bp, synthetic construct
  source 1..17: mol_type = other DNA
cccctccagctgtgggc

SEQ ID NO: 180953 - DNA, 17 bp, synthetic construct
  source 1..17: mol_type = other DNA
tcccctccagctgtggg

SEQ ID NO: 180954 - DNA, 17 bp, synthetic construct
  source 1..17: mol_type = other DNA
atcccctccagctgtgg

SEQ ID NO: 180955 - DNA, 17 bp, synthetic construct
  source 1..17: mol_type = other DNA
catcccctccagctgtg

SEQ ID NO: 180956 - DNA, 17 bp, synthetic construct
  source 1..17: mol_type = other DNA
ccatcccctccagctgt

SEQ ID NO: 180957 - DNA, 17 bp, synthetic construct
  source 1..17: mol_type = other DNA
gccatcccctccagctg

SEQ ID NO: 180958 - DNA, 17 bp, synthetic construct
  source 1..17: mol_type = other DNA
cgccatcccctccagct

SEQ ID NO: 180959 - DNA, 17 bp, synthetic construct
  source 1..17: mol_type = other DNA
ccgccatcccctccagc

SEQ ID NO: 180960 - DNA, 17 bp, synthetic construct
  source 1..17: mol_type = other DNA
tccgccatcccctccag

SEQ ID NO: 180961 - DNA, 17 bp, synthetic construct
  source 1..17: mol_type = other DNA
ctccgccatcccctcca

SEQ ID NO: 180962 - DNA, 17 bp, synthetic construct
  source 1..17: mol_type = other DNA
cctccgccatcccctcc

SEQ ID NO: 180963 - DNA, 17 bp, synthetic construct
  source 1..17: mol_type = other DNA
ccctccgccatcccctc

SEQ ID NO: 180964 - DNA, 17 bp, synthetic construct
  source 1..17: mol_type = other DNA
gccctccgccatcccct

SEQ ID NO: 180965 - DNA, 17 bp, synthetic construct
  source 1..17: mol_type = other DNA
agccctccgccatcccc

SEQ ID NO: 180966 - DNA, 17 bp, synthetic construct
  source 1..17: mol_type = other DNA
cagccctccgccatccc

SEQ ID NO: 180967 - DNA, 17 bp, synthetic construct
  source 1..17: mol_type = other DNA
gcagccctccgccatcc

SEQ ID NO: 180968 - DNA, 17 bp, synthetic construct
  source 1..17: mol_type = other DNA
agcagccctccgccatc

SEQ ID NO: 180969 - DNA, 17 bp, synthetic construct
  source 1..17: mol_type = other DNA
aagcagccctccgccat

SEQ ID NO: 180970 - DNA, 17 bp, synthetic construct
  source 1..17: mol_type = other DNA
gaagcagccctccgcca

SEQ ID NO: 180971 - DNA, 17 bp, synthetic construct
  source 1..17: mol_type = other DNA
agaagcagccctccgcc

SEQ ID NO: 180972 - DNA, 17 bp, synthetic construct
  source 1..17: mol_type = other DNA
cagaagcagccctccgc

SEQ ID NO: 180973 - DNA, 17 bp, synthetic construct
  source 1..17: mol_type = other DNA
gcagaagcagccctccg

SEQ ID NO: 180974 - DNA, 17 bp, synthetic construct
  source 1..17: mol_type = other DNA
ggcagaagcagccctcc

SEQ ID NO: 180975 - DNA, 17 bp, synthetic construct
  source 1..17: mol_type = other DNA
gggcagaagcagccctc

SEQ ID NO: 180976 - DNA, 17 bp, synthetic construct
  source 1..17: mol_type = other DNA
agggcagaagcagccct

SEQ ID NO: 180977 - DNA, 17 bp, synthetic construct
  source 1..17: mol_type = other DNA
cagggcagaagcagccc

SEQ ID NO: 180978 - DNA, 17 bp, synthetic construct
  source 1..17: mol_type = other DNA
tcagggcagaagcagcc

SEQ ID NO: 180979 - DNA, 17 bp, synthetic construct
  source 1..17: mol_type = other DNA
ctcagggcagaagcagc

SEQ ID NO: 180980 - DNA, 17 bp, synthetic construct
  source 1..17: mol_type = other DNA
cctcagggcagaagcag

SEQ ID NO: 180981 - DNA, 17 bp, synthetic construct
  source 1..17: mol_type = other DNA
tcctcagggcagaagca

SEQ ID NO: 180982 - DNA, 17 bp, synthetic construct
  source 1..17: mol_type = other DNA
gtcctcagggcagaagc

SEQ ID NO: 180983 - DNA, 17 bp, synthetic construct
  source 1..17: mol_type = other DNA
ggtcctcagggcagaag

SEQ ID NO: 180984 - DNA, 17 bp, synthetic construct
  source 1..17: mol_type = other DNA
tggtcctcagggcagaa

SEQ ID NO: 180985 - DNA, 17 bp, synthetic construct
  source 1..17: mol_type = other DNA
ctggtcctcagggcaga

SEQ ID NO: 180986 - DNA, 17 bp, synthetic construct
  source 1..17: mol_type = other DNA
tctggtcctcagggcag

SEQ ID NO: 180987 - DNA, 17 bp, synthetic construct
  source 1..17: mol_type = other DNA
atctggtcctcagggca

SEQ ID NO: 180988 - DNA, 17 bp, synthetic construct
  source 1..17: mol_type = other DNA
gatctggtcctcagggc

SEQ ID NO: 180989 - DNA, 17 bp, synthetic construct
  source 1..17: mol_type = other DNA
ggatctggtcctcaggg

SEQ ID NO: 180990 - DNA, 17 bp, synthetic construct
  source 1..17: mol_type = other DNA
aggatctggtcctcagg

SEQ ID NO: 180991 - DNA, 17 bp, synthetic construct
  source 1..17: mol_type = other DNA
gaggatctggtcctcag

SEQ ID NO: 180992 - DNA, 17 bp, synthetic construct
  source 1..17: mol_type = other DNA
agaggatctggtcctca

SEQ ID NO: 180993 - DNA, 17 bp, synthetic construct
  source 1..17: mol_type = other DNA
aagaggatctggtcctc

SEQ ID NO: 180994 - DNA, 17 bp, synthetic construct
  source 1..17: mol_type = other DNA
gaagaggatctggtcct

SEQ ID NO: 180995 - DNA, 17 bp, synthetic construct
  source 1..17: mol_type = other DNA
tgaagaggatctggtcc

SEQ ID NO: 180996 - DNA, 17 bp, synthetic construct
  source 1..17: mol_type = other DNA
ttgaagaggatctggtc

SEQ ID NO: 180997 - DNA, 17 bp, synthetic construct
  source 1..17: mol_type = other DNA
gttgaagaggatctggt

SEQ ID NO: 180998 - DNA, 17 bp, synthetic construct
  source 1..17: mol_type = other DNA
cgttgaagaggatctgg

SEQ ID NO: 180999 - DNA, 17 bp, synthetic construct
  source 1..17: mol_type = other DNA
gcgttgaagaggatctg

SEQ ID NO: 181000 - DNA, 17 bp, synthetic construct
  source 1..17: mol_type = other DNA
tgcgttgaagaggatct

SEQ ID NO: 181001 - DNA, 17 bp, synthetic construct
  source 1..17: mol_type = other DNA
gtgcgttgaagaggatc

SEQ ID NO: 181002 - DNA, 17 bp, synthetic construct
  source 1..17: mol_type = other DNA
tgtgcgttgaagaggat

SEQ ID NO: 181003 - DNA, 17 bp, synthetic construct
  source 1..17: mol_type = other DNA
gtgtgcgttgaagagga

SEQ ID NO: 181004 - DNA, 17 bp, synthetic construct
  source 1..17: mol_type = other DNA
tgtgtgcgttgaagagg

SEQ ID NO: 181005 - DNA, 17 bp, synthetic construct
  source 1..17: mol_type = other DNA
atgtgtgcgttgaagag

SEQ ID NO: 181006 - DNA, 17 bp, synthetic construct
  source 1..17: mol_type = other DNA
catgtgtgcgttgaaga

SEQ ID NO: 181007 - DNA, 17 bp, synthetic construct
  source 1..17: mol_type = other DNA
ccatgtgtgcgttgaag

SEQ ID NO: 181008 - DNA, 17 bp, synthetic construct
  source 1..17: mol_type = other DNA
cccatgtgtgcgttgaa

SEQ ID NO: 181009 - DNA, 17 bp, synthetic construct
  source 1..17: mol_type = other DNA
gcccatgtgtgcgttga

SEQ ID NO: 181010 - DNA, 17 bp, synthetic construct
  source 1..17: mol_type = other DNA
tgcccatgtgtgcgttg

SEQ ID NO: 181011 - DNA, 17 bp, synthetic construct
  source 1..17: mol_type = other DNA
atgcccatgtgtgcgtt

SEQ ID NO: 181012 - DNA, 17 bp, synthetic construct
  source 1..17: mol_type = other DNA
gatgcccatgtgtgcgt

SEQ ID NO: 181013 - DNA, 17 bp, synthetic construct
  source 1..17: mol_type = other DNA
agatgcccatgtgtgcg

SEQ ID NO: 181014 - DNA, 17 bp, synthetic construct
  source 1..17: mol_type = other DNA
cagatgcccatgtgtgc

SEQ ID NO: 181015 - DNA, 17 bp, synthetic construct
  source 1..17: mol_type = other DNA
gcagatgcccatgtgtg

SEQ ID NO: 181016 - DNA, 17 bp, synthetic construct
  source 1..17: mol_type = other DNA
cgcagatgcccatgtgt

SEQ ID NO: 181017 - DNA, 17 bp, synthetic construct
  source 1..17: mol_type = other DNA
acgcagatgcccatgtg

SEQ ID NO: 181018 - DNA, 17 bp, synthetic construct
  source 1..17: mol_type = other DNA
cacgcagatgcccatgt

SEQ ID NO: 181019 - DNA, 17 bp, synthetic construct
  source 1..17: mol_type = other DNA
gcacgcagatgcccatg

SEQ ID NO: 181020 - DNA, 17 bp, synthetic construct
  source 1..17: mol_type = other DNA
tgcacgcagatgcccat

SEQ ID NO: 181021 - DNA, 17 bp, synthetic construct
  source 1..17: mol_type = other DNA
ctgcacgcagatgccca

SEQ ID NO: 181022 - DNA, 17 bp, synthetic construct
  source 1..17: mol_type = other DNA
cctgcacgcagatgccc

SEQ ID NO: 181023 - DNA, 17 bp, synthetic construct
  source 1..17: mol_type = other DNA
gcctgcacgcagatgcc

SEQ ID NO: 181024 - DNA, 17 bp, synthetic construct
  source 1..17: mol_type = other DNA
ggcctgcacgcagatgc

SEQ ID NO: 181025 - DNA, 17 bp, synthetic construct
  source 1..17: mol_type = other DNA
aggcctgcacgcagatg

SEQ ID NO: 181026 - DNA, 17 bp, synthetic construct
  source 1..17: mol_type = other DNA
caggcctgcacgcagat

SEQ ID NO: 181027 - DNA, 17 bp, synthetic construct
  source 1..17: mol_type = other DNA
gcaggcctgcacgcaga

SEQ ID NO: 181028 - DNA, 17 bp, synthetic construct
  source 1..17: mol_type = other DNA
ggcaggcctgcacgcag

SEQ ID NO: 181029 - DNA, 17 bp, synthetic construct
  source 1..17: mol_type = other DNA
cggcaggcctgcacgca

SEQ ID NO: 181030 - DNA, 17 bp, synthetic construct
  source 1..17: mol_type = other DNA
acggcaggcctgcacgc

SEQ ID NO: 181031 - DNA, 17 bp, synthetic construct
  source 1..17: mol_type = other DNA
tacggcaggcctgcacg

SEQ ID NO: 181032 - DNA, 17 bp, synthetic construct
  source 1..17: mol_type = other DNA
ttacggcaggcctgcac

SEQ ID NO: 181033 - DNA, 17 bp, synthetic construct
  source 1..17: mol_type = other DNA
cttacggcaggcctgca

SEQ ID NO: 181034 - DNA, 17 bp, synthetic construct
  source 1..17: mol_type = other DNA
gcttacggcaggcctgc

SEQ ID NO: 181035 - DNA, 17 bp, synthetic construct
  source 1..17: mol_type = other DNA
agcttacggcaggcctg

SEQ ID NO: 181036 - DNA, 17 bp, synthetic construct
  source 1..17: mol_type = other DNA
gagcttacggcaggcct

SEQ ID NO: 181037 - DNA, 17 bp, synthetic construct
  source 1..17: mol_type = other DNA
ggagcttacggcaggcc

SEQ ID NO: 181038 - DNA, 17 bp, synthetic construct
  source 1..17: mol_type = other DNA
cggagcttacggcaggc

SEQ ID NO: 181039 - DNA, 17 bp, synthetic construct
  source 1..17: mol_type = other DNA
gcggagcttacggcagg

SEQ ID NO: 181040 - DNA, 17 bp, synthetic construct
  source 1..17: mol_type = other DNA
ggcggagcttacggcag

SEQ ID NO: 181041 - DNA, 17 bp, synthetic construct
  source 1..17: mol_type = other DNA
tggcggagcttacggca

SEQ ID NO: 181042 - DNA, 17 bp, synthetic construct
  source 1..17: mol_type = other DNA
gtggcggagcttacggc

SEQ ID NO: 181043 - DNA, 17 bp, synthetic construct
  source 1..17: mol_type = other DNA
ggtggcggagcttacgg

SEQ ID NO: 181044 - DNA, 17 bp, synthetic construct
  source 1..17: mol_type = other DNA
aggtggcggagcttacg

SEQ ID NO: 181045 - DNA, 17 bp, synthetic construct
  source 1..17: mol_type = other DNA
caggtggcggagcttac

SEQ ID NO: 181046 - DNA, 17 bp, synthetic construct
  source 1..17: mol_type = other DNA
acaggtggcggagctta

SEQ ID NO: 181047 - DNA, 17 bp, synthetic construct
  source 1..17: mol_type = other DNA
cacaggtggcggagctt

SEQ ID NO: 181048 - DNA, 17 bp, synthetic construct
  source 1..17: mol_type = other DNA
ccacaggtggcggagct

SEQ ID NO: 181049 - DNA, 17 bp, synthetic construct
  source 1..17: mol_type = other DNA
gccacaggtggcggagc

SEQ ID NO: 181050 - DNA, 17 bp, synthetic construct
  source 1..17: mol_type = other DNA
cgccacaggtggcggag

SEQ ID NO: 181051 - DNA, 17 bp, synthetic construct
  source 1..17: mol_type = other DNA
ccgccacaggtggcgga

SEQ ID NO: 181052 - DNA, 17 bp, synthetic construct
  source 1..17: mol_type = other DNA
cccgccacaggtggcgg

SEQ ID NO: 181053 - DNA, 17 bp, synthetic construct
  source 1..17: mol_type = other DNA
tcccgccacaggtggcg

SEQ ID NO: 181054 - DNA, 17 bp, synthetic construct
  source 1..17: mol_type = other DNA
atcccgccacaggtggc

SEQ ID NO: 181055 - DNA, 17 bp, synthetic construct
  source 1..17: mol_type = other DNA
tatcccgccacaggtgg

SEQ ID NO: 181056 - DNA, 17 bp, synthetic construct
  source 1..17: mol_type = other DNA
gtatcccgccacaggtg

SEQ ID NO: 181057 - DNA, 17 bp, synthetic construct
  source 1..17: mol_type = other DNA
cgtatcccgccacaggt

SEQ ID NO: 181058 - DNA, 17 bp, synthetic construct
  source 1..17: mol_type = other DNA
tcgtatcccgccacagg

SEQ ID NO: 181059 - DNA, 17 bp, synthetic construct
  source 1..17: mol_type = other DNA
gtcgtatcccgccacag

SEQ ID NO: 181060 - DNA, 17 bp, synthetic construct
  source 1..17: mol_type = other DNA
ggtcgtatcccgccaca

SEQ ID NO: 181061 - DNA, 17 bp, synthetic construct
  source 1..17: mol_type = other DNA
gggtcgtatcccgccac

SEQ ID NO: 181062 - DNA, 17 bp, synthetic construct
  source 1..17: mol_type = other DNA
agggtcgtatcccgcca

SEQ ID NO: 181063 - DNA, 17 bp, synthetic construct
  source 1..17: mol_type = other DNA
cagggtcgtatcccgcc

SEQ ID NO: 181064 - DNA, 17 bp, synthetic construct
  source 1..17: mol_type = other DNA
ccagggtcgtatcccgc

SEQ ID NO: 181065 - DNA, 17 bp, synthetic construct
  source 1..17: mol_type = other DNA
cccagggtcgtatcccg

SEQ ID NO: 181066 - DNA, 17 bp, synthetic construct
  source 1..17: mol_type = other DNA
gcccagggtcgtatccc

SEQ ID NO: 181067 - DNA, 17 bp, synthetic construct
  source 1..17: mol_type = other DNA
ggcccagggtcgtatcc

SEQ ID NO: 181068 - DNA, 17 bp, synthetic construct
  source 1..17: mol_type = other DNA
gggcccagggtcgtatc

SEQ ID NO: 181069 - DNA, 17 bp, synthetic construct
  source 1..17: mol_type = other DNA
cgggcccagggtcgtat

SEQ ID NO: 181070 - DNA, 17 bp, synthetic construct
  source 1..17: mol_type = other DNA
tcgggcccagggtcgta

SEQ ID NO: 181071 - DNA, 17 bp, synthetic construct
  source 1..17: mol_type = other DNA
gtcgggcccagggtcgt

SEQ ID NO: 181072 - DNA, 17 bp, synthetic construct
  source 1..17: mol_type = other DNA
ggtcgggcccagggtcg

SEQ ID NO: 181073 - DNA, 17 bp, synthetic construct
  source 1..17: mol_type = other DNA
gggtcgggcccagggtc

SEQ ID NO: 181074 - DNA, 17 bp, synthetic construct
  source 1..17: mol_type = other DNA
tgggtcgggcccagggt

SEQ ID NO: 181075 - DNA, 17 bp, synthetic construct
  source 1..17: mol_type = other DNA
ttgggtcgggcccaggg

SEQ ID NO: 181076 - DNA, 17 bp, synthetic construct
  source 1..17: mol_type = other DNA
cttgggtcgggcccagg

SEQ ID NO: 181077 - DNA, 17 bp, synthetic construct
  source 1..17: mol_type = other DNA
gcttgggtcgggcccag

SEQ ID NO: 181078 - DNA, 17 bp, synthetic construct
  source 1..17: mol_type = other DNA
tgcttgggtcgggccca

SEQ ID NO: 181079 - DNA, 17 bp, synthetic construct
  source 1..17: mol_type = other DNA
gtgcttgggtcgggccc

SEQ ID NO: 181080 - DNA, 17 bp, synthetic construct
  source 1..17: mol_type = other DNA
tgtgcttgggtcgggcc

SEQ ID NO: 181081 - DNA, 17 bp, synthetic construct
  source 1..17: mol_type = other DNA
gtgtgcttgggtcgggc

SEQ ID NO: 181082 - DNA, 17 bp, synthetic construct
  source 1..17: mol_type = other DNA
tgtgtgcttgggtcggg

SEQ ID NO: 181083 - DNA, 17 bp, synthetic construct
  source 1..17: mol_type = other DNA
gtgtgtgcttgggtcgg

SEQ ID NO: 181084 - DNA, 17 bp, synthetic construct
  source 1..17: mol_type = other DNA
tgtgtgtgcttgggtcg

SEQ ID NO: 181085 - DNA, 17 bp, synthetic construct
  source 1..17: mol_type = other DNA
ctgtgtgtgcttgggtc

SEQ ID NO: 181086 - DNA, 17 bp, synthetic construct
  source 1..17: mol_type = other DNA
cctgtgtgtgcttgggt

SEQ ID NO: 181087 - DNA, 17 bp, synthetic construct
  source 1..17: mol_type = other DNA
ccctgtgtgtgcttggg

SEQ ID NO: 181088 - DNA, 17 bp, synthetic construct
  source 1..17: mol_type = other DNA
accctgtgtgtgcttgg

SEQ ID NO: 181089 - DNA, 17 bp, synthetic construct
  source 1..17: mol_type = other DNA
caccctgtgtgtgcttg

SEQ ID NO: 181090 - DNA, 17 bp, synthetic construct
  source 1..17: mol_type = other DNA
ccaccctgtgtgtgctt

SEQ ID NO: 181091 - DNA, 17 bp, synthetic construct
  source 1..17: mol_type = other DNA
cccaccctgtgtgtgct

SEQ ID NO: 181092 - DNA, 17 bp, synthetic construct
  source 1..17: mol_type = other DNA
tcccaccctgtgtgtgc

SEQ ID NO: 181093 - DNA, 17 bp, synthetic construct
  source 1..17: mol_type = other DNA
ctcccaccctgtgtgtg

SEQ ID NO: 181094 - DNA, 17 bp, synthetic construct
  source 1..17: mol_type = other DNA
cctcccaccctgtgtgt

SEQ ID NO: 181095 - DNA, 17 bp, synthetic construct
  source 1..17: mol_type = other DNA
tcctcccaccctgtgtg

SEQ ID NO: 181096 - DNA, 17 bp, synthetic construct
  source 1..17: mol_type = other DNA
ctcctcccaccctgtgt

SEQ ID NO: 181097 - DNA, 17 bp, synthetic construct
  source 1..17: mol_type = other DNA
gctcctcccaccctgtg

SEQ ID NO: 181098 - DNA, 17 bp, synthetic construct
  source 1..17: mol_type = other DNA
ggctcctcccaccctgt

SEQ ID NO: 181099 - DNA, 17 bp, synthetic construct
  source 1..17: mol_type = other DNA
cggctcctcccaccctg

SEQ ID NO: 181100 - DNA, 17 bp, synthetic construct
  source 1..17: mol_type = other DNA
gcggctcctcccaccct

SEQ ID NO: 181101 - DNA, 17 bp, synthetic construct
  source 1..17: mol_type = other DNA
ggcggctcctcccaccc

SEQ ID NO: 181102 - DNA, 17 bp, synthetic construct
  source 1..17: mol_type = other DNA
gggcggctcctcccacc

SEQ ID NO: 181103 - DNA, 17 bp, synthetic construct
  source 1..17: mol_type = other DNA
tgggcggctcctcccac

SEQ ID NO: 181104 - DNA, 17 bp, synthetic construct
  source 1..17: mol_type = other DNA
ctgggcggctcctccca

SEQ ID NO: 181105 - DNA, 17 bp, synthetic construct
  source 1..17: mol_type = other DNA
cctgggcggctcctccc

SEQ ID NO: 181106 - DNA, 17 bp, synthetic construct
  source 1..17: mol_type = other DNA
tcctgggcggctcctcc

SEQ ID NO: 181107 - DNA, 17 bp, synthetic construct
  source 1..17: mol_type = other DNA
gtcctgggcggctcctc

SEQ ID NO: 181108 - DNA, 17 bp, synthetic construct
  source 1..17: mol_type = other DNA
ggtcctgggcggctcct

SEQ ID NO: 181109 - DNA, 17 bp, synthetic construct
  source 1..17: mol_type = other DNA
tggtcctgggcggctcc

SEQ ID NO: 181110 - DNA, 17 bp, synthetic construct
  source 1..17: mol_type = other DNA
atggtcctgggcggctc

SEQ ID NO: 181111 - DNA, 17 bp, synthetic construct
  source 1..17: mol_type = other DNA
catggtcctgggcggct

SEQ ID NO: 181112 - DNA, 17 bp, synthetic construct
  source 1..17: mol_type = other DNA
tcatggtcctgggcggc

SEQ ID NO: 181113 - DNA, 17 bp, synthetic construct
  source 1..17: mol_type = other DNA
atcatggtcctgggcgg

SEQ ID NO: 181114 - DNA, 17 bp, synthetic construct
  source 1..17: mol_type = other DNA
catcatggtcctgggcg

SEQ ID NO: 181115 - DNA, 17 bp, synthetic construct
  source 1..17: mol_type = other DNA
acatcatggtcctgggc

SEQ ID NO: 181116 - DNA, 17 bp, synthetic construct
  source 1..17: mol_type = other DNA
cacatcatggtcctggg

SEQ ID NO: 181117 - DNA, 17 bp, synthetic construct
  source 1..17: mol_type = other DNA
gcacatcatggtcctgg

SEQ ID NO: 181118 - DNA, 17 bp, synthetic construct
  source 1..17: mol_type = other DNA
agcacatcatggtcctg

SEQ ID NO: 181119 - DNA, 17 bp, synthetic construct
  source 1..17: mol_type = other DNA
gagcacatcatggtcct

SEQ ID NO: 181120 - DNA, 17 bp, synthetic construct
  source 1..17: mol_type = other DNA
agagcacatcatggtcc

SEQ ID NO: 181121 - DNA, 17 bp, synthetic construct
  source 1..17: mol_type = other DNA
gagagcacatcatggtc

SEQ ID NO: 181122 - DNA, 17 bp, synthetic construct
  source 1..17: mol_type = other DNA
ggagagcacatcatggt

SEQ ID NO: 181123 - DNA, 17 bp, synthetic construct
  source 1..17: mol_type = other DNA
gggagagcacatcatgg

SEQ ID NO: 181124 - DNA, 17 bp, synthetic construct
  source 1..17: mol_type = other DNA
ggggagagcacatcatg

SEQ ID NO: 181125 - DNA, 17 bp, synthetic construct
  source 1..17: mol_type = other DNA
aggggagagcacatcat

SEQ ID NO: 181126 - DNA, 17 bp, synthetic construct
  source 1..17: mol_type = other DNA
gaggggagagcacatca

SEQ ID NO: 181127 - DNA, 17 bp, synthetic construct
  source 1..17: mol_type = other DNA
agaggggagagcacatc

SEQ ID NO: 181128 - DNA, 17 bp, synthetic construct
  source 1..17: mol_type = other DNA
gagaggggagagcacat

SEQ ID NO: 181129 - DNA, 17 bp, synthetic construct
  source 1..17: mol_type = other DNA
ggagaggggagagcaca

SEQ ID NO: 181130 - DNA, 17 bp, synthetic construct
  source 1..17: mol_type = other DNA
gggagaggggagagcac

SEQ ID NO: 181131 - DNA, 17 bp, synthetic construct
  source 1..17: mol_type = other DNA
ggggagaggggagagca

SEQ ID NO: 181132 - DNA, 17 bp, synthetic construct
  source 1..17: mol_type = other DNA
tggggagaggggagagc

SEQ ID NO: 181133 - DNA, 17 bp, synthetic construct
  source 1..17: mol_type = other DNA
ctggggagaggggagag

SEQ ID NO: 181134 - DNA, 17 bp, synthetic construct
  source 1..17: mol_type = other DNA
gctggggagaggggaga

SEQ ID NO: 181135 - DNA, 17 bp, synthetic construct
  source 1..17: mol_type = other DNA
agctggggagaggggag

SEQ ID NO: 181136 - DNA, 17 bp, synthetic construct
  source 1..17: mol_type = other DNA
cagctggggagagggga

SEQ ID NO: 181137 - DNA, 17 bp, synthetic construct
  source 1..17: mol_type = other DNA
tcagctggggagagggg

SEQ ID NO: 181138 - DNA, 17 bp, synthetic construct
  source 1..17: mol_type = other DNA
gtcagctggggagaggg

SEQ ID NO: 181139 - DNA, 17 bp, synthetic construct
  source 1..17: mol_type = other DNA
ggtcagctggggagagg

SEQ ID NO: 181140 - DNA, 17 bp, synthetic construct
  source 1..17: mol_type = other DNA
gggtcagctggggagag

SEQ ID NO: 181141 - DNA, 17 bp, synthetic construct
  source 1..17: mol_type = other DNA
ggggtcagctggggaga

SEQ ID NO: 181142 - DNA, 17 bp, synthetic construct
  source 1..17: mol_type = other DNA
gggggtcagctggggag

SEQ ID NO: 181143 - DNA, 17 bp, synthetic construct
  source 1..17: mol_type = other DNA
cgggggtcagctgggga

SEQ ID NO: 181144 - DNA, 17 bp, synthetic construct
  source 1..17: mol_type = other DNA
acgggggtcagctgggg

SEQ ID NO: 181145 - DNA, 17 bp, synthetic construct
  source 1..17: mol_type = other DNA
cacgggggtcagctggg

SEQ ID NO: 181146 - DNA, 17 bp, synthetic construct
  source 1..17: mol_type = other DNA
tcacgggggtcagctgg

SEQ ID NO: 181147 - DNA, 17 bp, synthetic construct
  source 1..17: mol_type = other DNA
gtcacgggggtcagctg

SEQ ID NO: 181148 - DNA, 17 bp, synthetic construct
  source 1..17: mol_type = other DNA
ggtcacgggggtcagct

SEQ ID NO: 181149 - DNA, 17 bp, synthetic construct
  source 1..17: mol_type = other DNA
aggtcacgggggtcagc

SEQ ID NO: 181150 - DNA, 17 bp, synthetic construct
  source 1..17: mol_type = other DNA
caggtcacgggggtcag

SEQ ID NO: 181151 - DNA, 17 bp, synthetic construct
  source 1..17: mol_type = other DNA
acaggtcacgggggtca

SEQ ID NO: 181152 - DNA, 17 bp, synthetic construct
  source 1..17: mol_type = other DNA
aacaggtcacgggggtc

SEQ ID NO: 181153 - DNA, 17 bp, synthetic construct
  source 1..17: mol_type = other DNA
gaacaggtcacgggggt

SEQ ID NO: 181154 - DNA, 17 bp, synthetic construct
  source 1..17: mol_type = other DNA
agaacaggtcacggggg

SEQ ID NO: 181155 - DNA, 17 bp, synthetic construct
  source 1..17: mol_type = other DNA
cagaacaggtcacgggg

SEQ ID NO: 181156 - DNA, 17 bp, synthetic construct
  source 1..17: mol_type = other DNA
gcagaacaggtcacggg

SEQ ID NO: 181157 - DNA, 17 bp, synthetic construct
  source 1..17: mol_type = other DNA
ggcagaacaggtcacgg

SEQ ID NO: 181158 - DNA, 17 bp, synthetic construct
  source 1..17: mol_type = other DNA
gggcagaacaggtcacg

SEQ ID NO: 181159 - DNA, 17 bp, synthetic construct
  source 1..17: mol_type = other DNA
ggggcagaacaggtcac

SEQ ID NO: 181160 - DNA, 17 bp, synthetic construct
  source 1..17: mol_type = other DNA
tggggcagaacaggtca

SEQ ID NO: 181161 - DNA, 17 bp, synthetic construct
  source 1..17: mol_type = other DNA
gtggggcagaacaggtc

SEQ ID NO: 181162 - DNA, 17 bp, synthetic construct
  source 1..17: mol_type = other DNA
ggtggggcagaacaggt

SEQ ID NO: 181163 - DNA, 17 bp, synthetic construct
  source 1..17: mol_type = other DNA
tggtggggcagaacagg

SEQ ID NO: 181164 - DNA, 17 bp, synthetic construct
  source 1..17: mol_type = other DNA
ctggtggggcagaacag

SEQ ID NO: 181165 - DNA, 17 bp, synthetic construct
  source 1..17: mol_type = other DNA
tctggtggggcagaaca

SEQ ID NO: 181166 - DNA, 17 bp, synthetic construct
  source 1..17: mol_type = other DNA
ctctggtggggcagaac

SEQ ID NO: 181167 - DNA, 17 bp, synthetic construct
  source 1..17: mol_type = other DNA
gctctggtggggcagaa

SEQ ID NO: 181168 - DNA, 17 bp, synthetic construct
  source 1..17: mol_type = other DNA
tgctctggtggggcaga

SEQ ID NO: 181169 - DNA, 17 bp, synthetic construct
  source 1..17: mol_type = other DNA
atgctctggtggggcag

SEQ ID NO: 181170 - DNA, 17 bp, synthetic construct
  source 1..17: mol_type = other DNA
catgctctggtggggca

SEQ ID NO: 181171 - DNA, 17 bp, synthetic construct
  source 1..17: mol_type = other DNA
ccatgctctggtggggc

SEQ ID NO: 181172 - DNA, 17 bp, synthetic construct
  source 1..17: mol_type = other DNA
cccatgctctggtgggg

SEQ ID NO: 181173 - DNA, 17 bp, synthetic construct
  source 1..17: mol_type = other DNA
tcccatgctctggtggg

SEQ ID NO: 181174 - DNA, 17 bp, synthetic construct
  source 1..17: mol_type = other DNA
atcccatgctctggtgg

SEQ ID NO: 181175 - DNA, 17 bp, synthetic construct
  source 1..17: mol_type = other DNA
catcccatgctctggtg

SEQ ID NO: 181176 - DNA, 17 bp, synthetic construct
  source 1..17: mol_type = other DNA
ccatcccatgctctggt

SEQ ID NO: 181177 - DNA, 17 bp, synthetic construct
  source 1..17: mol_type = other DNA
gccatcccatgctctgg

SEQ ID NO: 181178 - DNA, 17 bp, synthetic construct
  source 1..17: mol_type = other DNA
ggccatcccatgctctg

SEQ ID NO: 181179 - DNA, 17 bp, synthetic construct
  source 1..17: mol_type = other DNA
gggccatcccatgctct

SEQ ID NO: 181180 - DNA, 17 bp, synthetic construct
  source 1..17: mol_type = other DNA
ggggccatcccatgctc

SEQ ID NO: 181181 - DNA, 17 bp, synthetic construct
  source 1..17: mol_type = other DNA
tggggccatcccatgct

SEQ ID NO: 181182 - DNA, 17 bp, synthetic construct
  source 1..17: mol_type = other DNA
ctggggccatcccatgc

SEQ ID NO: 181183 - DNA, 17 bp, synthetic construct
  source 1..17: mol_type = other DNA
tctggggccatcccatg

SEQ ID NO: 181184 - DNA, 17 bp, synthetic construct
  source 1..17: mol_type = other DNA
ctctggggccatcccat

SEQ ID NO: 181185 - DNA, 17 bp, synthetic construct
  source 1..17: mol_type = other DNA
actctggggccatccca

SEQ ID NO: 181186 - DNA, 17 bp, synthetic construct
  source 1..17: mol_type = other DNA
cactctggggccatccc

SEQ ID NO: 181187 - DNA, 17 bp, synthetic construct
  source 1..17: mol_type = other DNA
ccactctggggccatcc

SEQ ID NO: 181188 - DNA, 17 bp, synthetic construct
  source 1..17: mol_type = other DNA
gccactctggggccatc

SEQ ID NO: 181189 - DNA, 17 bp, synthetic construct
  source 1..17: mol_type = other DNA
ggccactctggggccat

SEQ ID NO: 181190 - DNA, 17 bp, synthetic construct
  source 1..17: mol_type = other DNA
gggccactctggggcca

SEQ ID NO: 181191 - DNA, 17 bp, synthetic construct
  source 1..17: mol_type = other DNA
agggccactctggggcc

SEQ ID NO: 181192 - DNA, 17 bp, synthetic construct
  source 1..17: mol_type = other DNA
cagggccactctggggc

SEQ ID NO: 181193 - DNA, 17 bp, synthetic construct
  source 1..17: mol_type = other DNA
tcagggccactctgggg

SEQ ID NO: 181194 - DNA, 17 bp, synthetic construct
  source 1..17: mol_type = other DNA
ttcagggccactctggg

SEQ ID NO: 181195 - DNA, 17 bp, synthetic construct
  source 1..17: mol_type = other DNA
gttcagggccactctgg

SEQ ID NO: 181196 - DNA, 17 bp, synthetic construct
  source 1..17: mol_type = other DNA
ggttcagggccactctg

SEQ ID NO: 181197 - DNA, 17 bp, synthetic construct
  source 1..17: mol_type = other DNA
gggttcagggccactct

SEQ ID NO: 181198 - DNA, 17 bp, synthetic construct
  source 1..17: mol_type = other DNA
agggttcagggccactc

SEQ ID NO: 181199 - DNA, 17 bp, synthetic construct
  source 1..17: mol_type = other DNA
cagggttcagggccact

SEQ ID NO: 181200 - DNA, 17 bp, synthetic construct
  source 1..17: mol_type = other DNA
gcagggttcagggccac

SEQ ID NO: 181201 - DNA, 17 bp, synthetic construct
  source 1..17: mol_type = other DNA
tgcagggttcagggcca

SEQ ID NO: 181202 - DNA, 17 bp, synthetic construct
  source 1..17: mol_type = other DNA
ctgcagggttcagggcc

SEQ ID NO: 181203 - DNA, 17 bp, synthetic construct
  source 1..17: mol_type = other DNA
tctgcagggttcagggc

SEQ ID NO: 181204 - DNA, 17 bp, synthetic construct
  source 1..17: mol_type = other DNA
ctctgcagggttcaggg

SEQ ID NO: 181205 - DNA, 17 bp, synthetic construct
  source 1..17: mol_type = other DNA
gctctgcagggttcagg

SEQ ID NO: 181206 - DNA, 17 bp, synthetic construct
  source 1..17: mol_type = other DNA
ggctctgcagggttcag

SEQ ID NO: 181207 - DNA, 17 bp, synthetic construct
  source 1..17: mol_type = other DNA
gggctctgcagggttca

SEQ ID NO: 181208 - DNA, 17 bp, synthetic construct
  source 1..17: mol_type = other DNA
ggggctctgcagggttc

SEQ ID NO: 181209 - DNA, 17 bp, synthetic construct
  source 1..17: mol_type = other DNA
gggggctctgcagggtt

SEQ ID NO: 181210 - DNA, 17 bp, synthetic construct
  source 1..17: mol_type = other DNA
tgggggctctgcagggt

SEQ ID NO: 181211 - DNA, 17 bp, synthetic construct
  source 1..17: mol_type = other DNA
gtgggggctctgcaggg

SEQ ID NO: 181212 - DNA, 17 bp, synthetic construct
  source 1..17: mol_type = other DNA
cgtgggggctctgcagg

SEQ ID NO: 181213 - DNA, 17 bp, synthetic construct
  source 1..17: mol_type = other DNA
ccgtgggggctctgcag

SEQ ID NO: 181214 - DNA, 17 bp, synthetic construct
  source 1..17: mol_type = other DNA
accgtgggggctctgca

SEQ ID NO: 181215 - DNA, 17 bp, synthetic construct
  source 1..17: mol_type = other DNA
gaccgtgggggctctgc

SEQ ID NO: 181216 - DNA, 17 bp, synthetic construct
  source 1..17: mol_type = other DNA
ggaccgtgggggctctg

SEQ ID NO: 181217 - DNA, 17 bp, synthetic construct
  source 1..17: mol_type = other DNA
gggaccgtgggggctct

SEQ ID NO: 181218 - DNA, 17 bp, synthetic construct
  source 1..17: mol_type = other DNA
ggggaccgtgggggctc

SEQ ID NO: 181219 - DNA, 17 bp, synthetic construct
  source 1..17: mol_type = other DNA
aggggaccgtgggggct

SEQ ID NO: 181220 - DNA, 17 bp, synthetic construct
  source 1..17: mol_type = other DNA
caggggaccgtgggggc

SEQ ID NO: 181221 - DNA, 17 bp, synthetic construct
  source 1..17: mol_type = other DNA
tcaggggaccgtggggg

SEQ ID NO: 181222 - DNA, 17 bp, synthetic construct
  source 1..17: mol_type = other DNA
ttcaggggaccgtgggg

SEQ ID NO: 181223 - DNA, 17 bp, synthetic construct
  source 1..17: mol_type = other DNA
cttcaggggaccgtggg

SEQ ID NO: 181224 - DNA, 17 bp, synthetic construct
  source 1..17: mol_type = other DNA
gcttcaggggaccgtgg

SEQ ID NO: 181225 - DNA, 17 bp, synthetic construct
  source 1..17: mol_type = other DNA
ggcttcaggggaccgtg

SEQ ID NO: 181226 - DNA, 17 bp, synthetic construct
  source 1..17: mol_type = other DNA
gggcttcaggggaccgt

SEQ ID NO: 181227 - DNA, 17 bp, synthetic construct
  source 1..17: mol_type = other DNA
ggggcttcaggggaccg

SEQ ID NO: 181228 - DNA, 17 bp, synthetic construct
  source 1..17: mol_type = other DNA
tggggcttcaggggacc

SEQ ID NO: 181229 - DNA, 17 bp, synthetic construct
  source 1..17: mol_type = other DNA
gtggggcttcaggggac

SEQ ID NO: 181230 - DNA, 17 bp, synthetic construct
  source 1..17: mol_type = other DNA
tgtggggcttcagggga

SEQ ID NO: 181231 - DNA, 17 bp, synthetic construct
  source 1..17: mol_type = other DNA
ctgtggggcttcagggg

SEQ ID NO: 181232 - DNA, 17 bp, synthetic construct
  source 1..17: mol_type = other DNA
cctgtggggcttcaggg

SEQ ID NO: 181233 - DNA, 17 bp, synthetic construct
  source 1..17: mol_type = other DNA
ccctgtggggcttcagg

SEQ ID NO: 181234 - DNA, 17 bp, synthetic construct
  source 1..17: mol_type = other DNA
tccctgtggggcttcag

SEQ ID NO: 181235 - DNA, 17 bp, synthetic construct
  source 1..17: mol_type = other DNA
ctccctgtggggcttca

SEQ ID NO: 181236 - DNA, 17 bp, synthetic construct
  source 1..17: mol_type = other DNA
cctccctgtggggcttc

SEQ ID NO: 181237 - DNA, 17 bp, synthetic construct
  source 1..17: mol_type = other DNA
gcctccctgtggggctt

SEQ ID NO: 181238 - DNA, 17 bp, synthetic construct
  source 1..17: mol_type = other DNA
agcctccctgtggggct

SEQ ID NO: 181239 - DNA, 17 bp, synthetic construct
  source 1..17: mol_type = other DNA
gagcctccctgtggggc

SEQ ID NO: 181240 - DNA, 17 bp, synthetic construct
  source 1..17: mol_type = other DNA
agagcctccctgtgggg

SEQ ID NO: 181241 - DNA, 17 bp, synthetic construct
  source 1..17: mol_type = other DNA
cagagcctccctgtggg

SEQ ID NO: 181242 - DNA, 17 bp, synthetic construct
  source 1..17: mol_type = other DNA
acagagcctccctgtgg

SEQ ID NO: 181243 - DNA, 17 bp, synthetic construct
  source 1..17: mol_type = other DNA
gacagagcctccctgtg

SEQ ID NO: 181244 - DNA, 17 bp, synthetic construct
  source 1..17: mol_type = other DNA
ggacagagcctccctgt

SEQ ID NO: 181245 - DNA, 17 bp, synthetic construct
  source 1..17: mol_type = other DNA
aggacagagcctccctg

SEQ ID NO: 181246 - DNA, 17 bp, synthetic construct
  source 1..17: mol_type = other DNA
aaggacagagcctccct

SEQ ID NO: 181247 - DNA, 17 bp, synthetic construct
  source 1..17: mol_type = other DNA
caaggacagagcctccc

SEQ ID NO: 181248 - DNA, 17 bp, synthetic construct
  source 1..17: mol_type = other DNA
tcaaggacagagcctcc

SEQ ID NO: 181249 - DNA, 17 bp, synthetic construct
  source 1..17: mol_type = other DNA
ctcaaggacagagcctc

SEQ ID NO: 181250 - DNA, 17 bp, synthetic construct
  source 1..17: mol_type = other DNA
actcaaggacagagcct

SEQ ID NO: 181251 - DNA, 17 bp, synthetic construct
  source 1..17: mol_type = other DNA
cactcaaggacagagcc

SEQ ID NO: 181252 - DNA, 17 bp, synthetic construct
  source 1..17: mol_type = other DNA
tcactcaaggacagagc

SEQ ID NO: 181253 - DNA, 17 bp, synthetic construct
  source 1..17: mol_type = other DNA
atcactcaaggacagag

SEQ ID NO: 181254 - DNA, 17 bp, synthetic construct
  source 1..17: mol_type = other DNA
gatcactcaaggacaga

SEQ ID NO: 181255 - DNA, 17 bp, synthetic construct
  source 1..17: mol_type = other DNA
ggatcactcaaggacag

SEQ ID NO: 181256 - DNA, 17 bp, synthetic construct
  source 1..17: mol_type = other DNA
aggatcactcaaggaca

SEQ ID NO: 181257 - DNA, 17 bp, synthetic construct
  source 1..17: mol_type = other DNA
caggatcactcaaggac

SEQ ID NO: 181258 - DNA, 17 bp, synthetic construct
  source 1..17: mol_type = other DNA
acaggatcactcaagga

SEQ ID NO: 181259 - DNA, 17 bp, synthetic construct
  source 1..17: mol_type = other DNA
cacaggatcactcaagg

SEQ ID NO: 181260 - DNA, 17 bp, synthetic construct
  source 1..17: mol_type = other DNA
tcacaggatcactcaag

SEQ ID NO: 181261 - DNA, 17 bp, synthetic construct
  source 1..17: mol_type = other DNA
atcacaggatcactcaa

SEQ ID NO: 181262 - DNA, 17 bp, synthetic construct
  source 1..17: mol_type = other DNA
catcacaggatcactca

SEQ ID NO: 181263 - DNA, 17 bp, synthetic construct
  source 1..17: mol_type = other DNA
ccatcacaggatcactc

SEQ ID NO: 181264 - DNA, 17 bp, synthetic construct
  source 1..17: mol_type = other DNA
accatcacaggatcact

SEQ ID NO: 181265 - DNA, 17 bp, synthetic construct
  source 1..17: mol_type = other DNA
gaccatcacaggatcac

SEQ ID NO: 181266 - DNA, 17 bp, synthetic construct
  source 1..17: mol_type = other DNA
ggaccatcacaggatca

SEQ ID NO: 181267 - DNA, 17 bp, synthetic construct
  source 1..17: mol_type = other DNA
gggaccatcacaggatc

SEQ ID NO: 181268 - DNA, 17 bp, synthetic construct
  source 1..17: mol_type = other DNA
agggaccatcacaggat

SEQ ID NO: 181269 - DNA, 17 bp, synthetic construct
  source 1..17: mol_type = other DNA
gagggaccatcacagga

SEQ ID NO: 181270 - DNA, 17 bp, synthetic construct
  source 1..17: mol_type = other DNA
ggagggaccatcacagg

SEQ ID NO: 181271 - DNA, 17 bp, synthetic construct
  source 1..17: mol_type = other DNA
gggagggaccatcacag

SEQ ID NO: 181272 - DNA, 17 bp, synthetic construct
  source 1..17: mol_type = other DNA
ggggagggaccatcaca

SEQ ID NO: 181273 - DNA, 17 bp, synthetic construct
  source 1..17: mol_type = other DNA
aggggagggaccatcac

SEQ ID NO: 181274 - DNA, 17 bp, synthetic construct
  source 1..17: mol_type = other DNA
caggggagggaccatca

SEQ ID NO: 181275 - DNA, 17 bp, synthetic construct
  source 1..17: mol_type = other DNA
tcaggggagggaccatc

SEQ ID NO: 181276 - DNA, 17 bp, synthetic construct
  source 1..17: mol_type = other DNA
ctcaggggagggaccat

SEQ ID NO: 181277 - DNA, 17 bp, synthetic construct
  source 1..17: mol_type = other DNA
gctcaggggagggacca

SEQ ID NO: 181278 - DNA, 17 bp, synthetic construct
  source 1..17: mol_type = other DNA
ggctcaggggagggacc

SEQ ID NO: 181279 - DNA, 17 bp, synthetic construct
  source 1..17: mol_type = other DNA
gggctcaggggagggac

SEQ ID NO: 181280 - DNA, 17 bp, synthetic construct
  source 1..17: mol_type = other DNA
agggctcaggggaggga

SEQ ID NO: 181281 - DNA, 17 bp, synthetic construct
  source 1..17: mol_type = other DNA
cagggctcaggggaggg

SEQ ID NO: 181282 - DNA, 17 bp, synthetic construct
  source 1..17: mol_type = other DNA
gcagggctcaggggagg

SEQ ID NO: 181283 - DNA, 17 bp, synthetic construct
  source 1..17: mol_type = other DNA
ggcagggctcaggggag

SEQ ID NO: 181284 - DNA, 17 bp, synthetic construct
  source 1..17: mol_type = other DNA
aggcagggctcagggga

SEQ ID NO: 181285 - DNA, 17 bp, synthetic construct
  source 1..17: mol_type = other DNA
gaggcagggctcagggg

SEQ ID NO: 181286 - DNA, 17 bp, synthetic construct
  source 1..17: mol_type = other DNA
ggaggcagggctcaggg

SEQ ID NO: 181287 - DNA, 17 bp, synthetic construct
  source 1..17: mol_type = other DNA
gggaggcagggctcagg

SEQ ID NO: 181288 - DNA, 17 bp, synthetic construct
  source 1..17: mol_type = other DNA
tgggaggcagggctcag

SEQ ID NO: 181289 - DNA, 17 bp, synthetic construct
  source 1..17: mol_type = other DNA
gtgggaggcagggctca

SEQ ID NO: 181290 - DNA, 17 bp, synthetic construct
  source 1..17: mol_type = other DNA
ggtgggaggcagggctc

SEQ ID NO: 181291 - DNA, 17 bp, synthetic construct
  source 1..17: mol_type = other DNA
tggtgggaggcagggct

SEQ ID NO: 181292 - DNA, 17 bp, synthetic construct
  source 1..17: mol_type = other DNA
gtggtgggaggcagggc

SEQ ID NO: 181293 - DNA, 17 bp, synthetic construct
  source 1..17: mol_type = other DNA
ggtggtgggaggcaggg

SEQ ID NO: 181294 - DNA, 17 bp, synthetic construct
  source 1..17: mol_type = other DNA
tggtggtgggaggcagg

SEQ ID NO: 181295 - DNA, 17 bp, synthetic construct
  source 1..17: mol_type = other DNA
atggtggtgggaggcag

SEQ ID NO: 181296 - DNA, 17 bp, synthetic construct
  source 1..17: mol_type = other DNA
catggtggtgggaggca

SEQ ID NO: 181297 - DNA, 17 bp, synthetic construct
  source 1..17: mol_type = other DNA
ccatggtggtgggaggc

SEQ ID NO: 181298 - DNA, 17 bp, synthetic construct
  source 1..17: mol_type = other DNA
tccatggtggtgggagg

SEQ ID NO: 181299 - DNA, 17 bp, synthetic construct
  source 1..17: mol_type = other DNA
gtccatggtggtgggag

SEQ ID NO: 181300 - DNA, 17 bp, synthetic construct
  source 1..17: mol_type = other DNA
cgtccatggtggtggga

SEQ ID NO: 181301 - DNA, 17 bp, synthetic construct
  source 1..17: mol_type = other DNA
tcgtccatggtggtggg

SEQ ID NO: 181302 - DNA, 17 bp, synthetic construct
  source 1..17: mol_type = other DNA
ctcgtccatggtggtgg

SEQ ID NO: 181303 - DNA, 17 bp, synthetic construct
  source 1..17: mol_type = other DNA
cctcgtccatggtggtg

SEQ ID NO: 181304 - DNA, 17 bp, synthetic construct
  source 1..17: mol_type = other DNA
gcctcgtccatggtggt

SEQ ID NO: 181305 - DNA, 17 bp, synthetic construct
  source 1..17: mol_type = other DNA
agcctcgtccatggtgg

SEQ ID NO: 181306 - DNA, 17 bp, synthetic construct
  source 1..17: mol_type = other DNA
aagcctcgtccatggtg

SEQ ID NO: 181307 - DNA, 17 bp, synthetic construct
  source 1..17: mol_type = other DNA
gaagcctcgtccatggt

SEQ ID NO: 181308 - DNA, 17 bp, synthetic construct
  source 1..17: mol_type = other DNA
ggaagcctcgtccatgg

SEQ ID NO: 181309 - DNA, 17 bp, synthetic construct
  source 1..17: mol_type = other DNA
tggaagcctcgtccatg

SEQ ID NO: 181310 - DNA, 17 bp, synthetic construct
  source 1..17: mol_type = other DNA
atggaagcctcgtccat

SEQ ID NO: 181311 - DNA, 17 bp, synthetic construct
  source 1..17: mol_type = other DNA
catggaagcctcgtcca

SEQ ID NO: 181312 - DNA, 17 bp, synthetic construct
  source 1..17: mol_type = other DNA
gcatggaagcctcgtcc

SEQ ID NO: 181313 - DNA, 17 bp, synthetic construct
  source 1..17: mol_type = other DNA
tgcatggaagcctcgtc

SEQ ID NO: 181314 - DNA, 17 bp, synthetic construct
  source 1..17: mol_type = other DNA
gtgcatggaagcctcgt

SEQ ID NO: 181315 - DNA, 17 bp, synthetic construct
  source 1..17: mol_type = other DNA
agtgcatggaagcctcg

SEQ ID NO: 181316 - DNA, 17 bp, synthetic construct
  source 1..17: mol_type = other DNA
cagtgcatggaagcctc

SEQ ID NO: 181317 - DNA, 17 bp, synthetic construct
  source 1..17: mol_type = other DNA
tcagtgcatggaagcct

SEQ ID NO: 181318 - DNA, 17 bp, synthetic construct
  source 1..17: mol_type = other DNA
gtcagtgcatggaagcc

SEQ ID NO: 181319 - DNA, 17 bp, synthetic construct
  source 1..17: mol_type = other DNA
tgtcagtgcatggaagc

SEQ ID NO: 181320 - DNA, 17 bp, synthetic construct
  source 1..17: mol_type = other DNA
ctgtcagtgcatggaag

SEQ ID NO: 181321 - DNA, 17 bp, synthetic construct
  source 1..17: mol_type = other DNA
gctgtcagtgcatggaa

SEQ ID NO: 181322 - DNA, 17 bp, synthetic construct
  source 1..17: mol_type = other DNA
agctgtcagtgcatgga

SEQ ID NO: 181323 - DNA, 17 bp, synthetic construct
  source 1..17: mol_type = other DNA
cagctgtcagtgcatgg

SEQ ID NO: 181324 - DNA, 17 bp, synthetic construct
  source 1..17: mol_type = other DNA
ccagctgtcagtgcatg

SEQ ID NO: 181325 - DNA, 17 bp, synthetic construct
  source 1..17: mol_type = other DNA
cccagctgtcagtgcat

SEQ ID NO: 181326 - DNA, 17 bp, synthetic construct
  source 1..17: mol_type = other DNA
gcccagctgtcagtgca

SEQ ID NO: 181327 - DNA, 17 bp, synthetic construct
  source 1..17: mol_type = other DNA
agcccagctgtcagtgc

SEQ ID NO: 181328 - DNA, 17 bp, synthetic construct
  source 1..17: mol_type = other DNA
gagcccagctgtcagtg

SEQ ID NO: 181329 - DNA, 17 bp, synthetic construct
  source 1..17: mol_type = other DNA
tgagcccagctgtcagt

SEQ ID NO: 181330 - DNA, 17 bp, synthetic construct
  source 1..17: mol_type = other DNA
gtgagcccagctgtcag

SEQ ID NO: 181331 - DNA, 17 bp, synthetic construct
  source 1..17: mol_type = other DNA
cgtgagcccagctgtca

SEQ ID NO: 181332 - DNA, 17 bp, synthetic construct
  source 1..17: mol_type = other DNA
ccgtgagcccagctgtc

SEQ ID NO: 181333 - DNA, 17 bp, synthetic construct
  source 1..17: mol_type = other DNA
accgtgagcccagctgt

SEQ ID NO: 181334 - DNA, 17 bp, synthetic construct
  source 1..17: mol_type = other DNA
caccgtgagcccagctg

SEQ ID NO: 181335 - DNA, 17 bp, synthetic construct
  source 1..17: mol_type = other DNA
gcaccgtgagcccagct

SEQ ID NO: 181336 - DNA, 17 bp, synthetic construct
  source 1..17: mol_type = other DNA
ggcaccgtgagcccagc

SEQ ID NO: 181337 - DNA, 17 bp, synthetic construct
  source 1..17: mol_type = other DNA
gggcaccgtgagcccag

SEQ ID NO: 181338 - DNA, 17 bp, synthetic construct
  source 1..17: mol_type = other DNA
agggcaccgtgagccca

SEQ ID NO: 181339 - DNA, 17 bp, synthetic construct
  source 1..17: mol_type = other DNA
cagggcaccgtgagccc

SEQ ID NO: 181340 - DNA, 17 bp, synthetic construct
  source 1..17: mol_type = other DNA
ccagggcaccgtgagcc

SEQ ID NO: 181341 - DNA, 17 bp, synthetic construct
  source 1..17: mol_type = other DNA
gccagggcaccgtgagc

SEQ ID NO: 181342 - DNA, 17 bp, synthetic construct
  source 1..17: mol_type = other DNA
ggccagggcaccgtgag

SEQ ID NO: 181343 - DNA, 17 bp, synthetic construct
  source 1..17: mol_type = other DNA
aggccagggcaccgtga

SEQ ID NO: 181344 - DNA, 17 bp, synthetic construct
  source 1..17: mol_type = other DNA
caggccagggcaccgtg

SEQ ID NO: 181345 - DNA, 17 bp, synthetic construct
  source 1..17: mol_type = other DNA
tcaggccagggcaccgt

SEQ ID NO: 181346 - DNA, 17 bp, synthetic construct
  source 1..17: mol_type = other DNA
ctcaggccagggcaccg

SEQ ID NO: 181347 - DNA, 17 bp, synthetic construct
  source 1..17: mol_type = other DNA
gctcaggccagggcacc

SEQ ID NO: 181348 - DNA, 17 bp, synthetic construct
  source 1..17: mol_type = other DNA
agctcaggccagggcac

SEQ ID NO: 181349 - DNA, 17 bp, synthetic construct
  source 1..17: mol_type = other DNA
gagctcaggccagggca

SEQ ID NO: 181350 - DNA, 17 bp, synthetic construct
  source 1..17: mol_type = other DNA
ggagctcaggccagggc

SEQ ID NO: 181351 - DNA, 17 bp, synthetic construct
  source 1..17: mol_type = other DNA
tggagctcaggccaggg

SEQ ID NO: 181352 - DNA, 17 bp, synthetic construct
  source 1..17: mol_type = other DNA
ctggagctcaggccagg

SEQ ID NO: 181353 - DNA, 17 bp, synthetic construct
  source 1..17: mol_type = other DNA
gctggagctcaggccag

SEQ ID NO: 181354 - DNA, 17 bp, synthetic construct
  source 1..17: mol_type = other DNA
ggctggagctcaggcca

SEQ ID NO: 181355 - DNA, 17 bp, synthetic construct
  source 1..17: mol_type = other DNA
tggctggagctcaggcc

SEQ ID NO: 181356 - DNA, 17 bp, synthetic construct
  source 1..17: mol_type = other DNA
gtggctggagctcaggc

SEQ ID NO: 181357 - DNA, 17 bp, synthetic construct
  source 1..17: mol_type = other DNA
tgtggctggagctcagg

SEQ ID NO: 181358 - DNA, 17 bp, synthetic construct
  source 1..17: mol_type = other DNA
atgtggctggagctcag

SEQ ID NO: 181359 - DNA, 17 bp, synthetic construct
  source 1..17: mol_type = other DNA
gatgtggctggagctca

SEQ ID NO: 181360 - DNA, 17 bp, synthetic construct
  source 1..17: mol_type = other DNA
agatgtggctggagctc

SEQ ID NO: 181361 - DNA, 17 bp, synthetic construct
  source 1..17: mol_type = other DNA
cagatgtggctggagct

SEQ ID NO: 181362 - DNA, 17 bp, synthetic construct
  source 1..17: mol_type = other DNA
tcagatgtggctggagc

SEQ ID NO: 181363 - DNA, 17 bp, synthetic construct
  source 1..17: mol_type = other DNA
gtcagatgtggctggag

SEQ ID NO: 181364 - DNA, 17 bp, synthetic construct
  source 1..17: mol_type = other DNA
tgtcagatgtggctgga

SEQ ID NO: 181365 - DNA, 17 bp, synthetic construct
  source 1..17: mol_type = other DNA
gtgtcagatgtggctgg

SEQ ID NO: 181366 - DNA, 17 bp, synthetic construct
  source 1..17: mol_type = other DNA
ggtgtcagatgtggctg

SEQ ID NO: 181367 - DNA, 17 bp, synthetic construct
  source 1..17: mol_type = other DNA
gggtgtcagatgtggct

SEQ ID NO: 181368 - DNA, 17 bp, synthetic construct
  source 1..17: mol_type = other DNA
ggggtgtcagatgtggc

SEQ ID NO: 181369 - DNA, 17 bp, synthetic construct
  source 1..17: mol_type = other DNA
tggggtgtcagatgtgg

SEQ ID NO: 181370 - DNA, 17 bp, synthetic construct
  source 1..17: mol_type = other DNA
ttggggtgtcagatgtg

SEQ ID NO: 181371 - DNA, 17 bp, synthetic construct
  source 1..17: mol_type = other DNA
tttggggtgtcagatgt

SEQ ID NO: 181372 - DNA, 17 bp, synthetic construct
  source 1..17: mol_type = other DNA
ttttggggtgtcagatg

SEQ ID NO: 181373 - DNA, 17 bp, synthetic construct
  source 1..17: mol_type = other DNA
cttttggggtgtcagat

SEQ ID NO: 181374 - DNA, 17 bp, synthetic construct
  source 1..17: mol_type = other DNA
acttttggggtgtcaga

SEQ ID NO: 181375 - DNA, 17 bp, synthetic construct
  source 1..17: mol_type = other DNA
aacttttggggtgtcag

SEQ ID NO: 181376 - DNA, 17 bp, synthetic construct
  source 1..17: mol_type = other DNA
gaacttttggggtgtca

SEQ ID NO: 181377 - DNA, 17 bp, synthetic construct
  source 1..17: mol_type = other DNA
agaacttttggggtgtc

SEQ ID NO: 181378 - DNA, 17 bp, synthetic construct
  source 1..17: mol_type = other DNA
gagaacttttggggtgt

SEQ ID NO: 181379 - DNA, 17 bp, synthetic construct
  source 1..17: mol_type = other DNA
ggagaacttttggggtg

SEQ ID NO: 181380 - DNA, 17 bp, synthetic construct
  source 1..17: mol_type = other DNA
tggagaacttttggggt

SEQ ID NO: 181381 - DNA, 17 bp, synthetic construct
  source 1..17: mol_type = other DNA
ctggagaacttttgggg

SEQ ID NO: 181382 - DNA, 17 bp, synthetic construct
  source 1..17: mol_type = other DNA
cctggagaacttttggg

SEQ ID NO: 181383 - DNA, 17 bp, synthetic construct
  source 1..17: mol_type = other DNA
ccctggagaacttttgg

SEQ ID NO: 181384 - DNA, 17 bp, synthetic construct
  source 1..17: mol_type = other DNA
gccctggagaacttttg

SEQ ID NO: 181385 - DNA, 17 bp, synthetic construct
  source 1..17: mol_type = other DNA
ggccctggagaactttt

SEQ ID NO: 181386 - DNA, 17 bp, synthetic construct
  source 1..17: mol_type = other DNA
aggccctggagaacttt

SEQ ID NO: 181387 - DNA, 17 bp, synthetic construct
  source 1..17: mol_type = other DNA
aaggccctggagaactt

SEQ ID NO: 181388 - DNA, 17 bp, synthetic construct
  source 1..17: mol_type = other DNA
gaaggccctggagaact

SEQ ID NO: 181389 - DNA, 17 bp, synthetic construct
  source 1..17: mol_type = other DNA
ggaaggccctggagaac

SEQ ID NO: 181390 - DNA, 17 bp, synthetic construct
  source 1..17: mol_type = other DNA
tggaaggccctggagaa

SEQ ID NO: 181391 - DNA, 17 bp, synthetic construct
  source 1..17: mol_type = other DNA
atggaaggccctggaga

SEQ ID NO: 181392 - DNA, 17 bp, synthetic construct
  source 1..17: mol_type = other DNA
gatggaaggccctggag

SEQ ID NO: 181393 - DNA, 17 bp, synthetic construct
  source 1..17: mol_type = other DNA
ggatggaaggccctgga

SEQ ID NO: 181394 - DNA, 17 bp, synthetic construct
  source 1..17: mol_type = other DNA
gggatggaaggccctgg

SEQ ID NO: 181395 - DNA, 17 bp, synthetic construct
  source 1..17: mol_type = other DNA
cgggatggaaggccctg

SEQ ID NO: 181396 - DNA, 17 bp, synthetic construct
  source 1..17: mol_type = other DNA
ccgggatggaaggccct

SEQ ID NO: 181397 - DNA, 17 bp, synthetic construct
  source 1..17: mol_type = other DNA
cccgggatggaaggccc

SEQ ID NO: 181398 - DNA, 17 bp, synthetic construct
  source 1..17: mol_type = other DNA
ccccgggatggaaggcc

SEQ ID NO: 181399 - DNA, 17 bp, synthetic construct
  source 1..17: mol_type = other DNA
cccccgggatggaaggc

SEQ ID NO: 181400 - DNA, 17 bp, synthetic construct
  source 1..17: mol_type = other DNA
ccccccgggatggaagg

SEQ ID NO: 181401 - DNA, 17 bp, synthetic construct
  source 1..17: mol_type = other DNA
tccccccgggatggaag

SEQ ID NO: 181402 - DNA, 17 bp, synthetic construct
  source 1..17: mol_type = other DNA
ttccccccgggatggaa

SEQ ID NO: 181403 - DNA, 17 bp, synthetic construct
  source 1..17: mol_type = other DNA
cttccccccgggatgga

SEQ ID NO: 181404 - DNA, 17 bp, synthetic construct
  source 1..17: mol_type = other DNA
gcttccccccgggatgg

SEQ ID NO: 181405 - DNA, 17 bp, synthetic construct
  source 1..17: mol_type = other DNA
tgcttccccccgggatg

SEQ ID NO: 181406 - DNA, 17 bp, synthetic construct
  source 1..17: mol_type = other DNA
ctgcttccccccgggat

SEQ ID NO: 181407 - DNA, 17 bp, synthetic construct
  source 1..17: mol_type = other DNA
cctgcttccccccggga

SEQ ID NO: 181408 - DNA, 17 bp, synthetic construct
  source 1..17: mol_type = other DNA
gcctgcttccccccggg

SEQ ID NO: 181409 - DNA, 17 bp, synthetic construct
  source 1..17: mol_type = other DNA
agcctgcttccccccgg

SEQ ID NO: 181410 - DNA, 17 bp, synthetic construct
  source 1..17: mol_type = other DNA
gagcctgcttccccccg

SEQ ID NO: 181411 - DNA, 17 bp, synthetic construct
  source 1..17: mol_type = other DNA
ggagcctgcttcccccc

SEQ ID NO: 181412 - DNA, 17 bp, synthetic construct
  source 1..17: mol_type = other DNA
tggagcctgcttccccc

SEQ ID NO: 181413 - DNA, 17 bp, synthetic construct
  source 1..17: mol_type = other DNA
ctggagcctgcttcccc

SEQ ID NO: 181414 - DNA, 17 bp, synthetic construct
  source 1..17: mol_type = other DNA
cctggagcctgcttccc

SEQ ID NO: 181415 - DNA, 17 bp, synthetic construct
  source 1..17: mol_type = other DNA
gcctggagcctgcttcc

SEQ ID NO: 181416 - DNA, 17 bp, synthetic construct
  source 1..17: mol_type = other DNA
ggcctggagcctgcttc

SEQ ID NO: 181417 - DNA, 17 bp, synthetic construct
  source 1..17: mol_type = other DNA
aggcctggagcctgctt

SEQ ID NO: 181418 - DNA, 17 bp, synthetic construct
  source 1..17: mol_type = other DNA
caggcctggagcctgct

SEQ ID NO: 181419 - DNA, 17 bp, synthetic construct
  source 1..17: mol_type = other DNA
tcaggcctggagcctgc

SEQ ID NO: 181420 - DNA, 17 bp, synthetic construct
  source 1..17: mol_type = other DNA
ctcaggcctggagcctg

SEQ ID NO: 181421 - DNA, 17 bp, synthetic construct
  source 1..17: mol_type = other DNA
tctcaggcctggagcct

SEQ ID NO: 181422 - DNA, 17 bp, synthetic construct
  source 1..17: mol_type = other DNA
ctctcaggcctggagcc

SEQ ID NO: 181423 - DNA, 17 bp, synthetic construct
  source 1..17: mol_type = other DNA
gctctcaggcctggagc

SEQ ID NO: 181424 - DNA, 17 bp, synthetic construct
  source 1..17: mol_type = other DNA
tgctctcaggcctggag

SEQ ID NO: 181425 - DNA, 17 bp, synthetic construct
  source 1..17: mol_type = other DNA
gtgctctcaggcctgga

SEQ ID NO: 181426 - DNA, 17 bp, synthetic construct
  source 1..17: mol_type = other DNA
ggtgctctcaggcctgg

SEQ ID NO: 181427 - DNA, 17 bp, synthetic construct
  source 1..17: mol_type = other DNA
aggtgctctcaggcctg

SEQ ID NO: 181428 - DNA, 17 bp, synthetic construct
  source 1..17: mol_type = other DNA
gaggtgctctcaggcct

SEQ ID NO: 181429 - DNA, 17 bp, synthetic construct
  source 1..17: mol_type = other DNA
ggaggtgctctcaggcc

SEQ ID NO: 181430 - DNA, 17 bp, synthetic construct
  source 1..17: mol_type = other DNA
gggaggtgctctcaggc

SEQ ID NO: 181431 - DNA, 17 bp, synthetic construct
  source 1..17: mol_type = other DNA
tgggaggtgctctcagg

SEQ ID NO: 181432 - DNA, 17 bp, synthetic construct
  source 1..17: mol_type = other DNA
atgggaggtgctctcag

SEQ ID NO: 181433 - DNA, 17 bp, synthetic construct
  source 1..17: mol_type = other DNA
catgggaggtgctctca

SEQ ID NO: 181434 - DNA, 17 bp, synthetic construct
  source 1..17: mol_type = other DNA
ccatgggaggtgctctc

SEQ ID NO: 181435 - DNA, 17 bp, synthetic construct
  source 1..17: mol_type = other DNA
gccatgggaggtgctct

SEQ ID NO: 181436 - DNA, 17 bp, synthetic construct
  source 1..17: mol_type = other DNA
ggccatgggaggtgctc

SEQ ID NO: 181437 - DNA, 17 bp, synthetic construct
  source 1..17: mol_type = other DNA
tggccatgggaggtgct

SEQ ID NO: 181438 - DNA, 17 bp, synthetic construct
  source 1..17: mol_type = other DNA
ctggccatgggaggtgc

SEQ ID NO: 181439 - DNA, 17 bp, synthetic construct
  source 1..17: mol_type = other DNA
tctggccatgggaggtg

SEQ ID NO: 181440 - DNA, 17 bp, synthetic construct
  source 1..17: mol_type = other DNA
ctctggccatgggaggt

SEQ ID NO: 181441 - DNA, 17 bp, synthetic construct
  source 1..17: mol_type = other DNA
cctctggccatgggagg

SEQ ID NO: 181442 - DNA, 17 bp, synthetic construct
  source 1..17: mol_type = other DNA
gcctctggccatgggag

SEQ ID NO: 181443 - DNA, 17 bp, synthetic construct
  source 1..17: mol_type = other DNA
ggcctctggccatggga

SEQ ID NO: 181444 - DNA, 17 bp, synthetic construct
  source 1..17: mol_type = other DNA
gggcctctggccatggg

SEQ ID NO: 181445 - DNA, 17 bp, synthetic construct
  source 1..17: mol_type = other DNA
ggggcctctggccatgg

SEQ ID NO: 181446 - DNA, 17 bp, synthetic construct
  source 1..17: mol_type = other DNA
aggggcctctggccatg

SEQ ID NO: 181447 - DNA, 17 bp, synthetic construct
  source 1..17: mol_type = other DNA
gaggggcctctggccat

SEQ ID NO: 181448 - DNA, 17 bp, synthetic construct
  source 1..17: mol_type = other DNA
ggaggggcctctggcca

SEQ ID NO: 181449 - DNA, 17 bp, synthetic construct
  source 1..17: mol_type = other DNA
cggaggggcctctggcc

SEQ ID NO: 181450 - DNA, 17 bp, synthetic construct
  source 1..17: mol_type = other DNA
gcggaggggcctctggc

SEQ ID NO: 181451 - DNA, 17 bp, synthetic construct
  source 1..17: mol_type = other DNA
ggcggaggggcctctgg

SEQ ID NO: 181452 - DNA, 17 bp, synthetic construct
  source 1..17: mol_type = other DNA
aggcggaggggcctctg

SEQ ID NO: 181453 - DNA, 17 bp, synthetic construct
  source 1..17: mol_type = other DNA
caggcggaggggcctct

SEQ ID NO: 181454 - DNA, 17 bp, synthetic construct
  source 1..17: mol_type = other DNA
gcaggcggaggggcctc

SEQ ID NO: 181455 - DNA, 17 bp, synthetic construct
  source 1..17: mol_type = other DNA
tgcaggcggaggggcct

SEQ ID NO: 181456 - DNA, 17 bp, synthetic construct
  source 1..17: mol_type = other DNA
ttgcaggcggaggggcc

SEQ ID NO: 181457 - DNA, 17 bp, synthetic construct
  source 1..17: mol_type = other DNA
tttgcaggcggaggggc

SEQ ID NO: 181458 - DNA, 17 bp, synthetic construct
  source 1..17: mol_type = other DNA
gtttgcaggcggagggg

SEQ ID NO: 181459 - DNA, 17 bp, synthetic construct
  source 1..17: mol_type = other DNA
agtttgcaggcggaggg

SEQ ID NO: 181460 - DNA, 17 bp, synthetic construct
  source 1..17: mol_type = other DNA
gagtttgcaggcggagg

SEQ ID NO: 181461 - DNA, 17 bp, synthetic construct
  source 1..17: mol_type = other DNA
tgagtttgcaggcggag

SEQ ID NO: 181462 - DNA, 17 bp, synthetic construct
  source 1..17: mol_type = other DNA
ctgagtttgcaggcgga

SEQ ID NO: 181463 - DNA, 17 bp, synthetic construct
  source 1..17: mol_type = other DNA
gctgagtttgcaggcgg

SEQ ID NO: 181464 - DNA, 17 bp, synthetic construct
  source 1..17: mol_type = other DNA
tgctgagtttgcaggcg

SEQ ID NO: 181465 - DNA, 17 bp, synthetic construct
  source 1..17: mol_type = other DNA
gtgctgagtttgcaggc

SEQ ID NO: 181466 - DNA, 17 bp, synthetic construct
  source 1..17: mol_type = other DNA
ggtgctgagtttgcagg

SEQ ID NO: 181467 - DNA, 17 bp, synthetic construct
  source 1..17: mol_type = other DNA
gggtgctgagtttgcag

SEQ ID NO: 181468 - DNA, 17 bp, synthetic construct
  source 1..17: mol_type = other DNA
agggtgctgagtttgca

SEQ ID NO: 181469 - DNA, 17 bp, synthetic construct
  source 1..17: mol_type = other DNA
gagggtgctgagtttgc

SEQ ID NO: 181470 - DNA, 17 bp, synthetic construct
  source 1..17: mol_type = other DNA
ggagggtgctgagtttg

SEQ ID NO: 181471 - DNA, 17 bp, synthetic construct
  source 1..17: mol_type = other DNA
cggagggtgctgagttt

SEQ ID NO: 181472 - DNA, 17 bp, synthetic construct
  source 1..17: mol_type = other DNA
acggagggtgctgagtt

SEQ ID NO: 181473 - DNA, 17 bp, synthetic construct
  source 1..17: mol_type = other DNA
cacggagggtgctgagt

SEQ ID NO: 181474 - DNA, 17 bp, synthetic construct
  source 1..17: mol_type = other DNA
tcacggagggtgctgag

SEQ ID NO: 181475 - DNA, 17 bp, synthetic construct
  source 1..17: mol_type = other DNA
atcacggagggtgctga

SEQ ID NO: 181476 - DNA, 17 bp, synthetic construct
  source 1..17: mol_type = other DNA
catcacggagggtgctg

SEQ ID NO: 181477 - DNA, 17 bp, synthetic construct
  source 1..17: mol_type = other DNA
gcatcacggagggtgct

SEQ ID NO: 181478 - DNA, 17 bp, synthetic construct
  source 1..17: mol_type = other DNA
ggcatcacggagggtgc

SEQ ID NO: 181479 - DNA, 17 bp, synthetic construct
  source 1..17: mol_type = other DNA
tggcatcacggagggtg

SEQ ID NO: 181480 - DNA, 17 bp, synthetic construct
  source 1..17: mol_type = other DNA
atggcatcacggagggt

SEQ ID NO: 181481 - DNA, 17 bp, synthetic construct
  source 1..17: mol_type = other DNA
catggcatcacggaggg

SEQ ID NO: 181482 - DNA, 17 bp, synthetic construct
  source 1..17: mol_type = other DNA
gcatggcatcacggagg

SEQ ID NO: 181483 - DNA, 17 bp, synthetic construct
  source 1..17: mol_type = other DNA
agcatggcatcacggag

SEQ ID NO: 181484 - DNA, 17 bp, synthetic construct
  source 1..17: mol_type = other DNA
cagcatggcatcacgga

SEQ ID NO: 181485 - DNA, 17 bp, synthetic construct
  source 1..17: mol_type = other DNA
acagcatggcatcacgg

SEQ ID NO: 181486 - DNA, 17 bp, synthetic construct
  source 1..17: mol_type = other DNA
aacagcatggcatcacg

SEQ ID NO: 181487 - DNA, 17 bp, synthetic construct
  source 1..17: mol_type = other DNA
aaacagcatggcatcac

SEQ ID NO: 181488 - DNA, 17 bp, synthetic construct
  source 1..17: mol_type = other DNA
aaaacagcatggcatca

SEQ ID NO: 181489 - DNA, 17 bp, synthetic construct
  source 1..17: mol_type = other DNA
gaaaacagcatggcatc

SEQ ID NO: 181490 - DNA, 17 bp, synthetic construct
  source 1..17: mol_type = other DNA
agaaaacagcatggcat

SEQ ID NO: 181491 - DNA, 17 bp, synthetic construct
  source 1..17: mol_type = other DNA
aagaaaacagcatggca

SEQ ID NO: 181492 - DNA, 17 bp, synthetic construct
  source 1..17: mol_type = other DNA
aaagaaaacagcatggc

SEQ ID NO: 181493 - DNA, 17 bp, synthetic construct
  source 1..17: mol_type = other DNA
gaaagaaaacagcatgg

SEQ ID NO: 181494 - DNA, 17 bp, synthetic construct
  source 1..17: mol_type = other DNA
ggaaagaaaacagcatg

SEQ ID NO: 181495 - DNA, 17 bp, synthetic construct
  source 1..17: mol_type = other DNA
tggaaagaaaacagcat

SEQ ID NO: 181496 - DNA, 17 bp, synthetic construct
  source 1..17: mol_type = other DNA
ctggaaagaaaacagca

SEQ ID NO: 181497 - DNA, 17 bp, synthetic construct
  source 1..17: mol_type = other DNA
gctggaaagaaaacagc

SEQ ID NO: 181498 - DNA, 17 bp, synthetic construct
  source 1..17: mol_type = other DNA
ggctggaaagaaaacag

SEQ ID NO: 181499 - DNA, 17 bp, synthetic construct
  source 1..17: mol_type = other DNA
aggctggaaagaaaaca

SEQ ID NO: 181500 - DNA, 17 bp, synthetic construct
  source 1..17: mol_type = other DNA
caggctggaaagaaaac

SEQ ID NO: 181501 - DNA, 17 bp, synthetic construct
  source 1..17: mol_type = other DNA
gcaggctggaaagaaaa

SEQ ID NO: 181502 - DNA, 17 bp, synthetic construct
  source 1..17: mol_type = other DNA
cgcaggctggaaagaaa

SEQ ID NO: 181503 - DNA, 17 bp, synthetic construct
  source 1..17: mol_type = other DNA
acgcaggctggaaagaa

SEQ ID NO: 181504 - DNA, 17 bp, synthetic construct
  source 1..17: mol_type = other DNA
cacgcaggctggaaaga

SEQ ID NO: 181505 - DNA, 17 bp, synthetic construct
  source 1..17: mol_type = other DNA
ccacgcaggctggaaag

SEQ ID NO: 181506 - DNA, 17 bp, synthetic construct
  source 1..17: mol_type = other DNA
cccacgcaggctggaaa

SEQ ID NO: 181507 - DNA, 17 bp, synthetic construct
  source 1..17: mol_type = other DNA
tcccacgcaggctggaa

SEQ ID NO: 181508 - DNA, 17 bp, synthetic construct
  source 1..17: mol_type = other DNA
gtcccacgcaggctgga

SEQ ID NO: 181509 - DNA, 17 bp, synthetic construct
  source 1..17: mol_type = other DNA
ggtcccacgcaggctgg

SEQ ID NO: 181510 - DNA, 17 bp, synthetic construct
  source 1..17: mol_type = other DNA
gggtcccacgcaggctg

SEQ ID NO: 181511 - DNA, 17 bp, synthetic construct
  source 1..17: mol_type = other DNA
cgggtcccacgcaggct

SEQ ID NO: 181512 - DNA, 17 bp, synthetic construct
  source 1..17: mol_type = other DNA
tcgggtcccacgcaggc

SEQ ID NO: 181513 - DNA, 17 bp, synthetic construct
  source 1..17: mol_type = other DNA
atcgggtcccacgcagg

SEQ ID NO: 181514 - DNA, 17 bp, synthetic construct
  source 1..17: mol_type = other DNA
catcgggtcccacgcag

SEQ ID NO: 181515 - DNA, 17 bp, synthetic construct
  source 1..17: mol_type = other DNA
ccatcgggtcccacgca

SEQ ID NO: 181516 - DNA, 17 bp, synthetic construct
  source 1..17: mol_type = other DNA
cccatcgggtcccacgc

SEQ ID NO: 181517 - DNA, 17 bp, synthetic construct
  source 1..17: mol_type = other DNA
acccatcgggtcccacg

SEQ ID NO: 181518 - DNA, 17 bp, synthetic construct
  source 1..17: mol_type = other DNA
aacccatcgggtcccac

SEQ ID NO: 181519 - DNA, 17 bp, synthetic construct
  source 1..17: mol_type = other DNA
aaacccatcgggtccca

SEQ ID NO: 181520 - DNA, 17 bp, synthetic construct
  source 1..17: mol_type = other DNA
gaaacccatcgggtccc

SEQ ID NO: 181521 - DNA, 17 bp, synthetic construct
  source 1..17: mol_type = other DNA
ggaaacccatcgggtcc

SEQ ID NO: 181522 - DNA, 17 bp, synthetic construct
  source 1..17: mol_type = other DNA
aggaaacccatcgggtc

SEQ ID NO: 181523 - DNA, 17 bp, synthetic construct
  source 1..17: mol_type = other DNA
taggaaacccatcgggt

SEQ ID NO: 181524 - DNA, 17 bp, synthetic construct
  source 1..17: mol_type = other DNA
ttaggaaacccatcggg

SEQ ID NO: 181525 - DNA, 17 bp, synthetic construct
  source 1..17: mol_type = other DNA
tttaggaaacccatcgg

SEQ ID NO: 181526 - DNA, 17 bp, synthetic construct
  source 1..17: mol_type = other DNA
atttaggaaacccatcg

SEQ ID NO: 181527 - DNA, 17 bp, synthetic construct
  source 1..17: mol_type = other DNA
aatttaggaaacccatc

SEQ ID NO: 181528 - DNA, 17 bp, synthetic construct
  source 1..17: mol_type = other DNA
aaatttaggaaacccat

SEQ ID NO: 181529 - DNA, 17 bp, synthetic construct
  source 1..17: mol_type = other DNA
caaatttaggaaaccca

SEQ ID NO: 181530 - DNA, 17 bp, synthetic construct
  source 1..17: mol_type = other DNA
acaaatttaggaaaccc

SEQ ID NO: 181531 - DNA, 17 bp, synthetic construct
  source 1..17: mol_type = other DNA
cacaaatttaggaaacc

SEQ ID NO: 181532 - DNA, 17 bp, synthetic construct
  source 1..17: mol_type = other DNA
tcacaaatttaggaaac

SEQ ID NO: 181533 - DNA, 17 bp, synthetic construct
  source 1..17: mol_type = other DNA
ctcacaaatttaggaaa

SEQ ID NO: 181534 - DNA, 17 bp, synthetic construct
  source 1..17: mol_type = other DNA
actcacaaatttaggaa

SEQ ID NO: 181535 - DNA, 17 bp, synthetic construct
  source 1..17: mol_type = other DNA
cactcacaaatttagga

SEQ ID NO: 181536 - DNA, 17 bp, synthetic construct
  source 1..17: mol_type = other DNA
ccactcacaaatttagg

SEQ ID NO: 181537 - DNA, 17 bp, synthetic construct
  source 1..17: mol_type = other DNA
gccactcacaaatttag

SEQ ID NO: 181538 - DNA, 17 bp, synthetic construct
  source 1..17: mol_type = other DNA
agccactcacaaattta

SEQ ID NO: 181539 - DNA, 17 bp, synthetic construct
  source 1..17: mol_type = other DNA
gagccactcacaaattt

SEQ ID NO: 181540 - DNA, 17 bp, synthetic construct
  source 1..17: mol_type = other DNA
ggagccactcacaaatt

SEQ ID NO: 181541 - DNA, 17 bp, synthetic construct
  source 1..17: mol_type = other DNA
tggagccactcacaaat

SEQ ID NO: 181542 - DNA, 17 bp, synthetic construct
  source 1..17: mol_type = other DNA
gtggagccactcacaaa

SEQ ID NO: 181543 - DNA, 17 bp, synthetic construct
  source 1..17: mol_type = other DNA
ggtggagccactcacaa

SEQ ID NO: 181544 - DNA, 17 bp, synthetic construct
  source 1..17: mol_type = other DNA
gggtggagccactcaca

SEQ ID NO: 181545 - DNA, 17 bp, synthetic construct
  source 1..17: mol_type = other DNA
ggggtggagccactcac

SEQ ID NO: 181546 - DNA, 17 bp, synthetic construct
  source 1..17: mol_type = other DNA
gggggtggagccactca

SEQ ID NO: 181547 - DNA, 17 bp, synthetic construct
  source 1..17: mol_type = other DNA
tgggggtggagccactc

SEQ ID NO: 181548 - DNA, 17 bp, synthetic construct
  source 1..17: mol_type = other DNA
gtgggggtggagccact

SEQ ID NO: 181549 - DNA, 17 bp, synthetic construct
  source 1..17: mol_type = other DNA
ggtgggggtggagccac

SEQ ID NO: 181550 - DNA, 17 bp, synthetic construct
  source 1..17: mol_type = other DNA
aggtgggggtggagcca

SEQ ID NO: 181551 - DNA, 17 bp, synthetic construct
  source 1..17: mol_type = other DNA
caggtgggggtggagcc

SEQ ID NO: 181552 - DNA, 17 bp, synthetic construct
  source 1..17: mol_type = other DNA
gcaggtgggggtggagc

SEQ ID NO: 181553 - DNA, 17 bp, synthetic construct
  source 1..17: mol_type = other DNA
ggcaggtgggggtggag

SEQ ID NO: 181554 - DNA, 17 bp, synthetic construct
  source 1..17: mol_type = other DNA
gggcaggtgggggtgga

SEQ ID NO: 181555 - DNA, 17 bp, synthetic construct
  source 1..17: mol_type = other DNA
agggcaggtgggggtgg

SEQ ID NO: 181556 - DNA, 17 bp, synthetic construct
  source 1..17: mol_type = other DNA
tagggcaggtgggggtg

SEQ ID NO: 181557 - DNA, 17 bp, synthetic construct
  source 1..17: mol_type = other DNA
gtagggcaggtgggggt

SEQ ID NO: 181558 - DNA, 17 bp, synthetic construct
  source 1..17: mol_type = other DNA
ggtagggcaggtggggg

SEQ ID NO: 181559 - DNA, 17 bp, synthetic construct
  source 1..17: mol_type = other DNA
gggtagggcaggtgggg

SEQ ID NO: 181560 - DNA, 17 bp, synthetic construct
  source 1..17: mol_type = other DNA
ggggtagggcaggtggg

SEQ ID NO: 181561 - DNA, 17 bp, synthetic construct
  source 1..17: mol_type = other DNA
tggggtagggcaggtgg

SEQ ID NO: 181562 - DNA, 17 bp, synthetic construct
  source 1..17: mol_type = other DNA
gtggggtagggcaggtg

SEQ ID NO: 181563 - DNA, 17 bp, synthetic construct
  source 1..17: mol_type = other DNA
ggtggggtagggcaggt

SEQ ID NO: 181564 - DNA, 17 bp, synthetic construct
  source 1..17: mol_type = other DNA
gggtggggtagggcagg

SEQ ID NO: 181565 - DNA, 17 bp, synthetic construct
  source 1..17: mol_type = other DNA
agggtggggtagggcag

SEQ ID NO: 181566 - DNA, 17 bp, synthetic construct
  source 1..17: mol_type = other DNA
gagggtggggtagggca

SEQ ID NO: 181567 - DNA, 17 bp, synthetic construct
  source 1..17: mol_type = other DNA
agagggtggggtagggc

SEQ ID NO: 181568 - DNA, 17 bp, synthetic construct
  source 1..17: mol_type = other DNA
gagagggtggggtaggg

SEQ ID NO: 181569 - DNA, 17 bp, synthetic construct
  source 1..17: mol_type = other DNA
cgagagggtggggtagg

SEQ ID NO: 181570 - DNA, 17 bp, synthetic construct
  source 1..17: mol_type = other DNA
gcgagagggtggggtag

SEQ ID NO: 181571 - DNA, 17 bp, synthetic construct
  source 1..17: mol_type = other DNA
cgcgagagggtggggta

SEQ ID NO: 181572 - DNA, 17 bp, synthetic construct
  source 1..17: mol_type = other DNA
tcgcgagagggtggggt

SEQ ID NO: 181573 - DNA, 17 bp, synthetic construct
  source 1..17: mol_type = other DNA
ctcgcgagagggtgggg

SEQ ID NO: 181574 - DNA, 17 bp, synthetic construct
  source 1..17: mol_type = other DNA
gctcgcgagagggtggg

SEQ ID NO: 181575 - DNA, 17 bp, synthetic construct
  source 1..17: mol_type = other DNA
agctcgcgagagggtgg

SEQ ID NO: 181576 - DNA, 17 bp, synthetic construct
  source 1..17: mol_type = other DNA
cagctcgcgagagggtg

SEQ ID NO: 181577 - DNA, 17 bp, synthetic construct
  source 1..17: mol_type = other DNA
tcagctcgcgagagggt

SEQ ID NO: 181578 - DNA, 17 bp, synthetic construct
  source 1..17: mol_type = other DNA
ctcagctcgcgagaggg

SEQ ID NO: 181579 - DNA, 17 bp, synthetic construct
  source 1..17: mol_type = other DNA
cctcagctcgcgagagg

SEQ ID NO: 181580 - DNA, 17 bp, synthetic construct
  source 1..17: mol_type = other DNA
ccctcagctcgcgagag

SEQ ID NO: 181581 - DNA, 17 bp, synthetic construct
  source 1..17: mol_type = other DNA
tccctcagctcgcgaga

SEQ ID NO: 181582 - DNA, 17 bp, synthetic construct
  source 1..17: mol_type = other DNA
ctccctcagctcgcgag

SEQ ID NO: 181583 - DNA, 17 bp, synthetic construct
  source 1..17: mol_type = other DNA
cctccctcagctcgcga

SEQ ID NO: 181584 - DNA, 17 bp, synthetic construct
  source 1..17: mol_type = other DNA
ccctccctcagctcgcg

SEQ ID NO: 181585 - DNA, 17 bp, synthetic construct
  source 1..17: mol_type = other DNA
tccctccctcagctcgc

SEQ ID NO: 181586 - DNA, 17 bp, synthetic construct
  source 1..17: mol_type = other DNA
ctccctccctcagctcg

SEQ ID NO: 181587 - DNA, 17 bp, synthetic construct
  source 1..17: mol_type = other DNA
cctccctccctcagctc

SEQ ID NO: 181588 - DNA, 17 bp, synthetic construct
  source 1..17: mol_type = other DNA
ccctccctccctcagct

SEQ ID NO: 181589 - DNA, 17 bp, synthetic construct
  source 1..17: mol_type = other DNA
tccctccctccctcagc

SEQ ID NO: 181590 - DNA, 17 bp, synthetic construct
  source 1..17: mol_type = other DNA
ttccctccctccctcag

SEQ ID NO: 181591 - DNA, 17 bp, synthetic construct
  source 1..17: mol_type = other DNA
cttccctccctccctca

SEQ ID NO: 181592 - DNA, 17 bp, synthetic construct
  source 1..17: mol_type = other DNA
ccttccctccctccctc

SEQ ID NO: 181593 - DNA, 17 bp, synthetic construct
  source 1..17: mol_type = other DNA
tccttccctccctccct

SEQ ID NO: 181594 - DNA, 17 bp, synthetic construct
  source 1..17: mol_type = other DNA
ctccttccctccctccc

SEQ ID NO: 181595 - DNA, 17 bp, synthetic construct
  source 1..17: mol_type = other DNA
gctccttccctccctcc

SEQ ID NO: 181596 - DNA, 17 bp, synthetic construct
  source 1..17: mol_type = other DNA
tgctccttccctccctc

SEQ ID NO: 181597 - DNA, 17 bp, synthetic construct
  source 1..17: mol_type = other DNA
atgctccttccctccct

SEQ ID NO: 181598 - DNA, 17 bp, synthetic construct
  source 1..17: mol_type = other DNA
gatgctccttccctccc

SEQ ID NO: 181599 - DNA, 17 bp, synthetic construct
  source 1..17: mol_type = other DNA
ggatgctccttccctcc

SEQ ID NO: 181600 - DNA, 17 bp, synthetic construct
  source 1..17: mol_type = other DNA
gggatgctccttccctc

SEQ ID NO: 181601 - DNA, 17 bp, synthetic construct
  source 1..17: mol_type = other DNA
ggggatgctccttccct

SEQ ID NO: 181602 - DNA, 17 bp, synthetic construct
  source 1..17: mol_type = other DNA
tggggatgctccttccc

SEQ ID NO: 181603 - DNA, 17 bp, synthetic construct
  source 1..17: mol_type = other DNA
atggggatgctccttcc

SEQ ID NO: 181604 - DNA, 17 bp, synthetic construct
  source 1..17: mol_type = other DNA
gatggggatgctccttc

SEQ ID NO: 181605 - DNA, 17 bp, synthetic construct
  source 1..17: mol_type = other DNA
ggatggggatgctcctt

SEQ ID NO: 181606 - DNA, 17 bp, synthetic construct
  source 1..17: mol_type = other DNA
gggatggggatgctcct

SEQ ID NO: 181607 - DNA, 17 bp, synthetic construct
  source 1..17: mol_type = other DNA
tgggatggggatgctcc

SEQ ID NO: 181608 - DNA, 17 bp, synthetic construct
  source 1..17: mol_type = other DNA
gtgggatggggatgctc

SEQ ID NO: 181609 - DNA, 17 bp, synthetic construct
  source 1..17: mol_type = other DNA
tgtgggatggggatgct

SEQ ID NO: 181610 - DNA, 17 bp, synthetic construct
  source 1..17: mol_type = other DNA
ctgtgggatggggatgc

SEQ ID NO: 181611 - DNA, 17 bp, synthetic construct
  source 1..17: mol_type = other DNA
cctgtgggatggggatg

SEQ ID NO: 181612 - DNA, 17 bp, synthetic construct
  source 1..17: mol_type = other DNA
ccctgtgggatggggat

SEQ ID NO: 181613 - DNA, 17 bp, synthetic construct
  source 1..17: mol_type = other DNA
gccctgtgggatgggga

SEQ ID NO: 181614 - DNA, 17 bp, synthetic construct
  source 1..17: mol_type = other DNA
tgccctgtgggatgggg

SEQ ID NO: 181615 - DNA, 17 bp, synthetic construct
  source 1..17: mol_type = other DNA
ctgccctgtgggatggg

SEQ ID NO: 181616 - DNA, 17 bp, synthetic construct
  source 1..17: mol_type = other DNA
gctgccctgtgggatgg

SEQ ID NO: 181617 - DNA, 17 bp, synthetic construct
  source 1..17: mol_type = other DNA
agctgccctgtgggatg

SEQ ID NO: 181618 - DNA, 17 bp, synthetic construct
  source 1..17: mol_type = other DNA
cagctgccctgtgggat

SEQ ID NO: 181619 - DNA, 17 bp, synthetic construct
  source 1..17: mol_type = other DNA
acagctgccctgtggga

SEQ ID NO: 181620 - DNA, 17 bp, synthetic construct
  source 1..17: mol_type = other DNA
cacagctgccctgtggg

SEQ ID NO: 181621 - DNA, 17 bp, synthetic construct
  source 1..17: mol_type = other DNA
ccacagctgccctgtgg

SEQ ID NO: 181622 - DNA, 17 bp, synthetic construct
  source 1..17: mol_type = other DNA
cccacagctgccctgtg

SEQ ID NO: 181623 - DNA, 17 bp, synthetic construct
  source 1..17: mol_type = other DNA
ccccacagctgccctgt

SEQ ID NO: 181624 - DNA, 17 bp, synthetic construct
  source 1..17: mol_type = other DNA
gccccacagctgccctg

SEQ ID NO: 181625 - DNA, 17 bp, synthetic construct
  source 1..17: mol_type = other DNA
cgccccacagctgccct

SEQ ID NO: 181626 - DNA, 17 bp, synthetic construct
  source 1..17: mol_type = other DNA
gcgccccacagctgccc

SEQ ID NO: 181627 - DNA, 17 bp, synthetic construct
  source 1..17: mol_type = other DNA
ggcgccccacagctgcc

SEQ ID NO: 181628 - DNA, 17 bp, synthetic construct
  source 1..17: mol_type = other DNA
gggcgccccacagctgc

SEQ ID NO: 181629 - DNA, 17 bp, synthetic construct
  source 1..17: mol_type = other DNA
cgggcgccccacagctg

SEQ ID NO: 181630 - DNA, 17 bp, synthetic construct
  source 1..17: mol_type = other DNA
tcgggcgccccacagct

SEQ ID NO: 181631 - DNA, 17 bp, synthetic construct
  source 1..17: mol_type = other DNA
ctcgggcgccccacagc

SEQ ID NO: 181632 - DNA, 17 bp, synthetic construct
  source 1..17: mol_type = other DNA
actcgggcgccccacag

SEQ ID NO: 181633 - DNA, 17 bp, synthetic construct
  source 1..17: mol_type = other DNA
cactcgggcgccccaca

SEQ ID NO: 181634 - DNA, 17 bp, synthetic construct
  source 1..17: mol_type = other DNA
acactcgggcgccccac

SEQ ID NO: 181635 - DNA, 17 bp, synthetic construct
  source 1..17: mol_type = other DNA
cacactcgggcgcccca

SEQ ID NO: 181636 - DNA, 17 bp, synthetic construct
  source 1..17: mol_type = other DNA
tcacactcgggcgcccc

SEQ ID NO: 181637 - DNA, 17 bp, synthetic construct
  source 1..17: mol_type = other DNA
gtcacactcgggcgccc

SEQ ID NO: 181638 - DNA, 17 bp, synthetic construct
  source 1..17: mol_type = other DNA
cgtcacactcgggcgcc

SEQ ID NO: 181639 - DNA, 17 bp, synthetic construct
  source 1..17: mol_type = other DNA
acgtcacactcgggcgc

SEQ ID NO: 181640 - DNA, 17 bp, synthetic construct
  source 1..17: mol_type = other DNA
cacgtcacactcgggcg

SEQ ID NO: 181641 - DNA, 17 bp, synthetic construct
  source 1..17: mol_type = other DNA
ccacgtcacactcgggc

SEQ ID NO: 181642 - DNA, 17 bp, synthetic construct
  source 1..17: mol_type = other DNA
tccacgtcacactcggg

SEQ ID NO: 181643 - DNA, 17 bp, synthetic construct
  source 1..17: mol_type = other DNA
gtccacgtcacactcgg

SEQ ID NO: 181644 - DNA, 17 bp, synthetic construct
  source 1..17: mol_type = other DNA
cgtccacgtcacactcg

SEQ ID NO: 181645 - DNA, 17 bp, synthetic construct
  source 1..17: mol_type = other DNA
acgtccacgtcacactc

SEQ ID NO: 181646 - DNA, 17 bp, synthetic construct
  source 1..17: mol_type = other DNA
cacgtccacgtcacact

SEQ ID NO: 181647 - DNA, 17 bp, synthetic construct
  source 1..17: mol_type = other DNA
gcacgtccacgtcacac

SEQ ID NO: 181648 - DNA, 17 bp, synthetic construct
  source 1..17: mol_type = other DNA
ggcacgtccacgtcaca

SEQ ID NO: 181649 - DNA, 17 bp, synthetic construct
  source 1..17: mol_type = other DNA
tggcacgtccacgtcac

SEQ ID NO: 181650 - DNA, 17 bp, synthetic construct
  source 1..17: mol_type = other DNA
ctggcacgtccacgtca

SEQ ID NO: 181651 - DNA, 17 bp, synthetic construct
  source 1..17: mol_type = other DNA
actggcacgtccacgtc

SEQ ID NO: 181652 - DNA, 17 bp, synthetic construct
  source 1..17: mol_type = other DNA
cactggcacgtccacgt

SEQ ID NO: 181653 - DNA, 17 bp, synthetic construct
  source 1..17: mol_type = other DNA
ccactggcacgtccacg

SEQ ID NO: 181654 - DNA, 17 bp, synthetic construct
  source 1..17: mol_type = other DNA
gccactggcacgtccac

SEQ ID NO: 181655 - DNA, 17 bp, synthetic construct
  source 1..17: mol_type = other DNA
agccactggcacgtcca

SEQ ID NO: 181656 - DNA, 17 bp, synthetic construct
  source 1..17: mol_type = other DNA
cagccactggcacgtcc

SEQ ID NO: 181657 - DNA, 17 bp, synthetic construct
  source 1..17: mol_type = other DNA
ccagccactggcacgtc

SEQ ID NO: 181658 - DNA, 17 bp, synthetic construct
  source 1..17: mol_type = other DNA
accagccactggcacgt

SEQ ID NO: 181659 - DNA, 17 bp, synthetic construct
  source 1..17: mol_type = other DNA
caccagccactggcacg

SEQ ID NO: 181660 - DNA, 17 bp, synthetic construct
  source 1..17: mol_type = other DNA
acaccagccactggcac

SEQ ID NO: 181661 - DNA, 17 bp, synthetic construct
  source 1..17: mol_type = other DNA
cacaccagccactggca

SEQ ID NO: 181662 - DNA, 17 bp, synthetic construct
  source 1..17: mol_type = other DNA
gcacaccagccactggc

SEQ ID NO: 181663 - DNA, 17 bp, synthetic construct
  source 1..17: mol_type = other DNA
cgcacaccagccactgg

SEQ ID NO: 181664 - DNA, 17 bp, synthetic construct
  source 1..17: mol_type = other DNA
gcgcacaccagccactg

SEQ ID NO: 181665 - DNA, 17 bp, synthetic construct
  source 1..17: mol_type = other DNA
agcgcacaccagccact

SEQ ID NO: 181666 - DNA, 17 bp, synthetic construct
  source 1..17: mol_type = other DNA
aagcgcacaccagccac

SEQ ID NO: 181667 - DNA, 17 bp, synthetic construct
  source 1..17: mol_type = other DNA
gaagcgcacaccagcca

SEQ ID NO: 181668 - DNA, 17 bp, synthetic construct
  source 1..17: mol_type = other DNA
ggaagcgcacaccagcc

SEQ ID NO: 181669 - DNA, 17 bp, synthetic construct
  source 1..17: mol_type = other DNA
aggaagcgcacaccagc

SEQ ID NO: 181670 - DNA, 17 bp, synthetic construct
  source 1..17: mol_type = other DNA
caggaagcgcacaccag

SEQ ID NO: 181671 - DNA, 17 bp, synthetic construct
  source 1..17: mol_type = other DNA
gcaggaagcgcacacca

SEQ ID NO: 181672 - DNA, 17 bp, synthetic construct
  source 1..17: mol_type = other DNA
ggcaggaagcgcacacc

SEQ ID NO: 181673 - DNA, 17 bp, synthetic construct
  source 1..17: mol_type = other DNA
gggcaggaagcgcacac

SEQ ID NO: 181674 - DNA, 17 bp, synthetic construct
  source 1..17: mol_type = other DNA
ggggcaggaagcgcaca

SEQ ID NO: 181675 - DNA, 17 bp, synthetic construct
  source 1..17: mol_type = other DNA
tggggcaggaagcgcac

SEQ ID NO: 181676 - DNA, 17 bp, synthetic construct
  source 1..17: mol_type = other DNA
atggggcaggaagcgca

SEQ ID NO: 181677 - DNA, 17 bp, synthetic construct
  source 1..17: mol_type = other DNA
gatggggcaggaagcgc

SEQ ID NO: 181678 - DNA, 17 bp, synthetic construct
  source 1..17: mol_type = other DNA
tgatggggcaggaagcg

SEQ ID NO: 181679 - DNA, 17 bp, synthetic construct
  source 1..17: mol_type = other DNA
gtgatggggcaggaagc

SEQ ID NO: 181680 - DNA, 17 bp, synthetic construct
  source 1..17: mol_type = other DNA
agtgatggggcaggaag

SEQ ID NO: 181681 - DNA, 17 bp, synthetic construct
  source 1..17: mol_type = other DNA
gagtgatggggcaggaa

SEQ ID NO: 181682 - DNA, 17 bp, synthetic construct
  source 1..17: mol_type = other DNA
agagtgatggggcagga

SEQ ID NO: 181683 - DNA, 17 bp, synthetic construct
  source 1..17: mol_type = other DNA
cagagtgatggggcagg

SEQ ID NO: 181684 - DNA, 17 bp, synthetic construct
  source 1..17: mol_type = other DNA
ccagagtgatggggcag

SEQ ID NO: 181685 - DNA, 17 bp, synthetic construct
  source 1..17: mol_type = other DNA
cccagagtgatggggca

SEQ ID NO: 181686 - DNA, 17 bp, synthetic construct
  source 1..17: mol_type = other DNA
gcccagagtgatggggc

SEQ ID NO: 181687 - DNA, 17 bp, synthetic construct
  source 1..17: mol_type = other DNA
ggcccagagtgatgggg

SEQ ID NO: 181688 - DNA, 17 bp, synthetic construct
  source 1..17: mol_type = other DNA
tggcccagagtgatggg

SEQ ID NO: 181689 - DNA, 17 bp, synthetic construct
  source 1..17: mol_type = other DNA
gtggcccagagtgatgg

SEQ ID NO: 181690 - DNA, 17 bp, synthetic construct
  source 1..17: mol_type = other DNA
agtggcccagagtgatg

SEQ ID NO: 181691 - DNA, 17 bp, synthetic construct
  source 1..17: mol_type = other DNA
gagtggcccagagtgat

SEQ ID NO: 181692 - DNA, 17 bp, synthetic construct
  source 1..17: mol_type = other DNA
cgagtggcccagagtga

SEQ ID NO: 181693 - DNA, 17 bp, synthetic construct
  source 1..17: mol_type = other DNA
ccgagtggcccagagtg

SEQ ID NO: 181694 - DNA, 17 bp, synthetic construct
  source 1..17: mol_type = other DNA
cccgagtggcccagagt

SEQ ID NO: 181695 - DNA, 17 bp, synthetic construct
  source 1..17: mol_type = other DNA
acccgagtggcccagag

SEQ ID NO: 181696 - DNA, 17 bp, synthetic construct
  source 1..17: mol_type = other DNA
tacccgagtggcccaga

SEQ ID NO: 181697 - DNA, 17 bp, synthetic construct
  source 1..17: mol_type = other DNA
gtacccgagtggcccag

SEQ ID NO: 181698 - DNA, 17 bp, synthetic construct
  source 1..17: mol_type = other DNA
ggtacccgagtggccca

SEQ ID NO: 181699 - DNA, 17 bp, synthetic construct
  source 1..17: mol_type = other DNA
tggtacccgagtggccc

SEQ ID NO: 181700 - DNA, 17 bp, synthetic construct
  source 1..17: mol_type = other DNA
ctggtacccgagtggcc

SEQ ID NO: 181701 - DNA, 17 bp, synthetic construct
  source 1..17: mol_type = other DNA
gctggtacccgagtggc

SEQ ID NO: 181702 - DNA, 17 bp, synthetic construct
  source 1..17: mol_type = other DNA
ggctggtacccgagtgg

SEQ ID NO: 181703 - DNA, 17 bp, synthetic construct
  source 1..17: mol_type = other DNA
gggctggtacccgagtg

SEQ ID NO: 181704 - DNA, 17 bp, synthetic construct
  source 1..17: mol_type = other DNA
cgggctggtacccgagt

SEQ ID NO: 181705 - DNA, 17 bp, synthetic construct
  source 1..17: mol_type = other DNA
tcgggctggtacccgag

SEQ ID NO: 181706 - DNA, 17 bp, synthetic construct
  source 1..17: mol_type = other DNA
ctcgggctggtacccga

SEQ ID NO: 181707 - DNA, 17 bp, synthetic construct
  source 1..17: mol_type = other DNA
cctcgggctggtacccg

SEQ ID NO: 181708 - DNA, 17 bp, synthetic construct
  source 1..17: mol_type = other DNA
ccctcgggctggtaccc

SEQ ID NO: 181709 - DNA, 17 bp, synthetic construct
  source 1..17: mol_type = other DNA
tccctcgggctggtacc

SEQ ID NO: 181710 - DNA, 17 bp, synthetic construct
  source 1..17: mol_type = other DNA
ctccctcgggctggtac

SEQ ID NO: 181711 - DNA, 17 bp, synthetic construct
  source 1..17: mol_type = other DNA
cctccctcgggctggta

SEQ ID NO: 181712 - DNA, 17 bp, synthetic construct
  source 1..17: mol_type = other DNA
ccctccctcgggctggt

SEQ ID NO: 181713 - DNA, 17 bp, synthetic construct
  source 1..17: mol_type = other DNA
cccctccctcgggctgg

SEQ ID NO: 181714 - DNA, 17 bp, synthetic construct
  source 1..17: mol_type = other DNA
ccccctccctcgggctg

SEQ ID NO: 181715 - DNA, 17 bp, synthetic construct
  source 1..17: mol_type = other DNA
accccctccctcgggct

SEQ ID NO: 181716 - DNA, 17 bp, synthetic construct
  source 1..17: mol_type = other DNA
caccccctccctcgggc

SEQ ID NO: 181717 - DNA, 17 bp, synthetic construct
  source 1..17: mol_type = other DNA
ccaccccctccctcggg

SEQ ID NO: 181718 - DNA, 17 bp, synthetic construct
  source 1..17: mol_type = other DNA
gccaccccctccctcgg

SEQ ID NO: 181719 - DNA, 17 bp, synthetic construct
  source 1..17: mol_type = other DNA
agccaccccctccctcg

SEQ ID NO: 181720 - DNA, 17 bp, synthetic construct
  source 1..17: mol_type = other DNA
cagccaccccctccctc

SEQ ID NO: 181721 - DNA, 17 bp, synthetic construct
  source 1..17: mol_type = other DNA
ccagccaccccctccct

SEQ ID NO: 181722 - DNA, 17 bp, synthetic construct
  source 1..17: mol_type = other DNA
tccagccaccccctccc

SEQ ID NO: 181723 - DNA, 17 bp, synthetic construct
  source 1..17: mol_type = other DNA
gtccagccaccccctcc

SEQ ID NO: 181724 - DNA, 17 bp, synthetic construct
  source 1..17: mol_type = other DNA
tgtccagccaccccctc

SEQ ID NO: 181725 - DNA, 17 bp, synthetic construct
  source 1..17: mol_type = other DNA
ctgtccagccaccccct

SEQ ID NO: 181726 - DNA, 17 bp, synthetic construct
  source 1..17: mol_type = other DNA
tctgtccagccaccccc

SEQ ID NO: 181727 - DNA, 17 bp, synthetic construct
  source 1..17: mol_type = other DNA
atctgtccagccacccc

SEQ ID NO: 181728 - DNA, 17 bp, synthetic construct
  source 1..17: mol_type = other DNA
catctgtccagccaccc

SEQ ID NO: 181729 - DNA, 17 bp, synthetic construct
  source 1..17: mol_type = other DNA
gcatctgtccagccacc

SEQ ID NO: 181730 - DNA, 17 bp, synthetic construct
  source 1..17: mol_type = other DNA
ggcatctgtccagccac

SEQ ID NO: 181731 - DNA, 17 bp, synthetic construct
  source 1..17: mol_type = other DNA
gggcatctgtccagcca

SEQ ID NO: 181732 - DNA, 17 bp, synthetic construct
  source 1..17: mol_type = other DNA
tgggcatctgtccagcc

SEQ ID NO: 181733 - DNA, 17 bp, synthetic construct
  source 1..17: mol_type = other DNA
ctgggcatctgtccagc

SEQ ID NO: 181734 - DNA, 17 bp, synthetic construct
  source 1..17: mol_type = other DNA
cctgggcatctgtccag

SEQ ID NO: 181735 - DNA, 17 bp, synthetic construct
  source 1..17: mol_type = other DNA
ccctgggcatctgtcca

SEQ ID NO: 181736 - DNA, 17 bp, synthetic construct
  source 1..17: mol_type = other DNA
accctgggcatctgtcc

SEQ ID NO: 181737 - DNA, 17 bp, synthetic construct
  source 1..17: mol_type = other DNA
aaccctgggcatctgtc

SEQ ID NO: 181738 - DNA, 17 bp, synthetic construct
  source 1..17: mol_type = other DNA
caaccctgggcatctgt

SEQ ID NO: 181739 - DNA, 17 bp, synthetic construct
  source 1..17: mol_type = other DNA
tcaaccctgggcatctg

SEQ ID NO: 181740 - DNA, 17 bp, synthetic construct
  source 1..17: mol_type = other DNA
gtcaaccctgggcatct

SEQ ID NO: 181741 - DNA, 17 bp, synthetic construct
  source 1..17: mol_type = other DNA
ggtcaaccctgggcatc

SEQ ID NO: 181742 - DNA, 17 bp, synthetic construct
  source 1..17: mol_type = other DNA
aggtcaaccctgggcat

SEQ ID NO: 181743 - DNA, 17 bp, synthetic construct
  source 1..17: mol_type = other DNA
caggtcaaccctgggca

SEQ ID NO: 181744 - DNA, 17 bp, synthetic construct
  source 1..17: mol_type = other DNA
acaggtcaaccctgggc

SEQ ID NO: 181745 - DNA, 17 bp, synthetic construct
  source 1..17: mol_type = other DNA
cacaggtcaaccctggg

SEQ ID NO: 181746 - DNA, 17 bp, synthetic construct
  source 1..17: mol_type = other DNA
acacaggtcaaccctgg

SEQ ID NO: 181747 - DNA, 17 bp, synthetic construct
  source 1..17: mol_type = other DNA
gacacaggtcaaccctg

SEQ ID NO: 181748 - DNA, 17 bp, synthetic construct
  source 1..17: mol_type = other DNA
agacacaggtcaaccct

SEQ ID NO: 181749 - DNA, 17 bp, synthetic construct
  source 1..17: mol_type = other DNA
cagacacaggtcaaccc

SEQ ID NO: 181750 - DNA, 17 bp, synthetic construct
  source 1..17: mol_type = other DNA
acagacacaggtcaacc

SEQ ID NO: 181751 - DNA, 17 bp, synthetic construct
  source 1..17: mol_type = other DNA
gacagacacaggtcaac

SEQ ID NO: 181752 - DNA, 17 bp, synthetic construct
  source 1..17: mol_type = other DNA
ggacagacacaggtcaa

SEQ ID NO: 181753 - DNA, 17 bp, synthetic construct
  source 1..17: mol_type = other DNA
tggacagacacaggtca

SEQ ID NO: 181754 - DNA, 17 bp, synthetic construct
  source 1..17: mol_type = other DNA
ctggacagacacaggtc

SEQ ID NO: 181755 - DNA, 17 bp, synthetic construct
  source 1..17: mol_type = other DNA
cctggacagacacaggt

SEQ ID NO: 181756 - DNA, 17 bp, synthetic construct
  source 1..17: mol_type = other DNA
tcctggacagacacagg

SEQ ID NO: 181757 - DNA, 17 bp, synthetic construct
  source 1..17: mol_type = other DNA
ctcctggacagacacag

SEQ ID NO: 181758 - DNA, 17 bp, synthetic construct
  source 1..17: mol_type = other DNA
gctcctggacagacaca

SEQ ID NO: 181759 - DNA, 17 bp, synthetic construct
  source 1..17: mol_type = other DNA
ggctcctggacagacac

SEQ ID NO: 181760 - DNA, 17 bp, synthetic construct
  source 1..17: mol_type = other DNA
gggctcctggacagaca

SEQ ID NO: 181761 - DNA, 17 bp, synthetic construct
  source 1..17: mol_type = other DNA
agggctcctggacagac

SEQ ID NO: 181762 - DNA, 17 bp, synthetic construct
  source 1..17: mol_type = other DNA
gagggctcctggacaga

SEQ ID NO: 181763 - DNA, 17 bp, synthetic construct
  source 1..17: mol_type = other DNA
tgagggctcctggacag

SEQ ID NO: 181764 - DNA, 17 bp, synthetic construct
  source 1..17: mol_type = other DNA
ctgagggctcctggaca

SEQ ID NO: 181765 - DNA, 17 bp, synthetic construct
  source 1..17: mol_type = other DNA
cctgagggctcctggac

SEQ ID NO: 181766 - DNA, 17 bp, synthetic construct
  source 1..17: mol_type = other DNA
ccctgagggctcctgga

SEQ ID NO: 181767 - DNA, 17 bp, synthetic construct
  source 1..17: mol_type = other DNA
tccctgagggctcctgg

SEQ ID NO: 181768 - DNA, 17 bp, synthetic construct
  source 1..17: mol_type = other DNA
gtccctgagggctcctg

SEQ ID NO: 181769 - DNA, 17 bp, synthetic construct
  source 1..17: mol_type = other DNA
ggtccctgagggctcct

SEQ ID NO: 181770 - DNA, 17 bp, synthetic construct
  source 1..17: mol_type = other DNA
gggtccctgagggctcc

SEQ ID NO: 181771 - DNA, 17 bp, synthetic construct
  source 1..17: mol_type = other DNA
ggggtccctgagggctc

SEQ ID NO: 181772 - DNA, 17 bp, synthetic construct
  source 1..17: mol_type = other DNA
gggggtccctgagggct

SEQ ID NO: 181773 - DNA, 17 bp, synthetic construct
  source 1..17: mol_type = other DNA
agggggtccctgagggc

SEQ ID NO: 181774 - DNA, 17 bp, synthetic construct
  source 1..17: mol_type = other DNA
aagggggtccctgaggg

SEQ ID NO: 181775 - DNA, 17 bp, synthetic construct
  source 1..17: mol_type = other DNA
caagggggtccctgagg

SEQ ID NO: 181776 - DNA, 17 bp, synthetic construct
  source 1..17: mol_type = other DNA
tcaagggggtccctgag

SEQ ID NO: 181777 - DNA, 17 bp, synthetic construct
  source 1..17: mol_type = other DNA
atcaagggggtccctga

SEQ ID NO: 181778 - DNA, 17 bp, synthetic construct
  source 1..17: mol_type = other DNA
gatcaagggggtccctg

SEQ ID NO: 181779 - DNA, 17 bp, synthetic construct
  source 1..17: mol_type = other DNA
ggatcaagggggtccct

SEQ ID NO: 181780 - DNA, 17 bp, synthetic construct
  source 1..17: mol_type = other DNA
tggatcaagggggtccc

SEQ ID NO: 181781 - DNA, 17 bp, synthetic construct
  source 1..17: mol_type = other DNA
atggatcaagggggtcc

SEQ ID NO: 181782 - DNA, 17 bp, synthetic construct
  source 1..17: mol_type = other DNA
aatggatcaagggggtc

SEQ ID NO: 181783 - DNA, 17 bp, synthetic construct
  source 1..17: mol_type = other DNA
gaatggatcaagggggt

SEQ ID NO: 181784 - DNA, 17 bp, synthetic construct
  source 1..17: mol_type = other DNA
ggaatggatcaaggggg

SEQ ID NO: 181785 - DNA, 17 bp, synthetic construct
  source 1..17: mol_type = other DNA
tggaatggatcaagggg

SEQ ID NO: 181786 - DNA, 17 bp, synthetic construct
  source 1..17: mol_type = other DNA
ctggaatggatcaaggg

SEQ ID NO: 181787 - DNA, 17 bp, synthetic construct
  source 1..17: mol_type = other DNA
gctggaatggatcaagg

SEQ ID NO: 181788 - DNA, 17 bp, synthetic construct
  source 1..17: mol_type = other DNA
ggctggaatggatcaag

SEQ ID NO: 181789 - DNA, 17 bp, synthetic construct
  source 1..17: mol_type = other DNA
gggctggaatggatcaa

SEQ ID NO: 181790 - DNA, 17 bp, synthetic construct
  source 1..17: mol_type = other DNA
cgggctggaatggatca

SEQ ID NO: 181791 - DNA, 17 bp, synthetic construct
  source 1..17: mol_type = other DNA
ccgggctggaatggatc

SEQ ID NO: 181792 - DNA, 17 bp, synthetic construct
  source 1..17: mol_type = other DNA
cccgggctggaatggat

SEQ ID NO: 181793 - DNA, 17 bp, synthetic construct
  source 1..17: mol_type = other DNA
ccccgggctggaatgga

SEQ ID NO: 181794 - DNA, 17 bp, synthetic construct
  source 1..17: mol_type = other DNA
tccccgggctggaatgg

SEQ ID NO: 181795 - DNA, 17 bp, synthetic construct
  source 1..17: mol_type = other DNA
ctccccgggctggaatg

SEQ ID NO: 181796 - DNA, 17 bp, synthetic construct
  source 1..17: mol_type = other DNA
gctccccgggctggaat

SEQ ID NO: 181797 - DNA, 17 bp, synthetic construct
  source 1..17: mol_type = other DNA
cgctccccgggctggaa

SEQ ID NO: 181798 - DNA, 17 bp, synthetic construct
  source 1..17: mol_type = other DNA
ccgctccccgggctgga

SEQ ID NO: 181799 - DNA, 17 bp, synthetic construct
  source 1..17: mol_type = other DNA
accgctccccgggctgg

SEQ ID NO: 181800 - DNA, 17 bp, synthetic construct
  source 1..17: mol_type = other DNA
caccgctccccgggctg

SEQ ID NO: 181801 - DNA, 17 bp, synthetic construct
  source 1..17: mol_type = other DNA
ccaccgctccccgggct

SEQ ID NO: 181802 - DNA, 17 bp, synthetic construct
  source 1..17: mol_type = other DNA
cccaccgctccccgggc

SEQ ID NO: 181803 - DNA, 17 bp, synthetic construct
  source 1..17: mol_type = other DNA
acccaccgctccccggg

SEQ ID NO: 181804 - DNA, 17 bp, synthetic construct
  source 1..17: mol_type = other DNA
gacccaccgctccccgg

SEQ ID NO: 181805 - DNA, 17 bp, synthetic construct
  source 1..17: mol_type = other DNA
tgacccaccgctccccg

SEQ ID NO: 181806 - DNA, 17 bp, synthetic construct
  source 1..17: mol_type = other DNA
ctgacccaccgctcccc

SEQ ID NO: 181807 - DNA, 17 bp, synthetic construct
  source 1..17: mol_type = other DNA
gctgacccaccgctccc

SEQ ID NO: 181808 - DNA, 17 bp, synthetic construct
  source 1..17: mol_type = other DNA
tgctgacccaccgctcc

SEQ ID NO: 181809 - DNA, 17 bp, synthetic construct
  source 1..17: mol_type = other DNA
ttgctgacccaccgctc

SEQ ID NO: 181810 - DNA, 17 bp, synthetic construct
  source 1..17: mol_type = other DNA
gttgctgacccaccgct

SEQ ID NO: 181811 - DNA, 17 bp, synthetic construct
  source 1..17: mol_type = other DNA
agttgctgacccaccgc

SEQ ID NO: 181812 - DNA, 17 bp, synthetic construct
  source 1..17: mol_type = other DNA
cagttgctgacccaccg

SEQ ID NO: 181813 - DNA, 17 bp, synthetic construct
  source 1..17: mol_type = other DNA
gcagttgctgacccacc

SEQ ID NO: 181814 - DNA, 17 bp, synthetic construct
  source 1..17: mol_type = other DNA
ggcagttgctgacccac

SEQ ID NO: 181815 - DNA, 17 bp, synthetic construct
  source 1..17: mol_type = other DNA
tggcagttgctgaccca

SEQ ID NO: 181816 - DNA, 17 bp, synthetic construct
  source 1..17: mol_type = other DNA
ctggcagttgctgaccc

SEQ ID NO: 181817 - DNA, 17 bp, synthetic construct
  source 1..17: mol_type = other DNA
actggcagttgctgacc

SEQ ID NO: 181818 - DNA, 17 bp, synthetic construct
  source 1..17: mol_type = other DNA
gactggcagttgctgac

SEQ ID NO: 181819 - DNA, 17 bp, synthetic construct
  source 1..17: mol_type = other DNA
ggactggcagttgctga

SEQ ID NO: 181820 - DNA, 17 bp, synthetic construct
  source 1..17: mol_type = other DNA
aggactggcagttgctg

SEQ ID NO: 181821 - DNA, 17 bp, synthetic construct
  source 1..17: mol_type = other DNA
caggactggcagttgct

SEQ ID NO: 181822 - DNA, 17 bp, synthetic construct
  source 1..17: mol_type = other DNA
gcaggactggcagttgc

SEQ ID NO: 181823 - DNA, 17 bp, synthetic construct
  source 1..17: mol_type = other DNA
cgcaggactggcagttg

SEQ ID NO: 181824 - DNA, 17 bp, synthetic construct
  source 1..17: mol_type = other DNA
acgcaggactggcagtt

SEQ ID NO: 181825 - DNA, 17 bp, synthetic construct
  source 1..17: mol_type = other DNA
cacgcaggactggcagt

SEQ ID NO: 181826 - DNA, 17 bp, synthetic construct
  source 1..17: mol_type = other DNA
acacgcaggactggcag

SEQ ID NO: 181827 - DNA, 17 bp, synthetic construct
  source 1..17: mol_type = other DNA
cacacgcaggactggca

SEQ ID NO: 181828 - DNA, 17 bp, synthetic construct
  source 1..17: mol_type = other DNA
acacacgcaggactggc

SEQ ID NO: 181829 - DNA, 17 bp, synthetic construct
  source 1..17: mol_type = other DNA
cacacacgcaggactgg

SEQ ID NO: 181830 - DNA, 17 bp, synthetic construct
  source 1..17: mol_type = other DNA
tcacacacgcaggactg

SEQ ID NO: 181831 - DNA, 17 bp, synthetic construct
  source 1..17: mol_type = other DNA
gtcacacacgcaggact

SEQ ID NO: 181832 - DNA, 17 bp, synthetic construct
  source 1..17: mol_type = other DNA
cgtcacacacgcaggac

SEQ ID NO: 181833 - DNA, 17 bp, synthetic construct
  source 1..17: mol_type = other DNA
tcgtcacacacgcagga

SEQ ID NO: 181834 - DNA, 17 bp, synthetic construct
  source 1..17: mol_type = other DNA
ctcgtcacacacgcagg

SEQ ID NO: 181835 - DNA, 17 bp, synthetic construct
  source 1..17: mol_type = other DNA
cctcgtcacacacgcag

SEQ ID NO: 181836 - DNA, 17 bp, synthetic construct
  source 1..17: mol_type = other DNA
ccctcgtcacacacgca

SEQ ID NO: 181837 - DNA, 17 bp, synthetic construct
  source 1..17: mol_type = other DNA
accctcgtcacacacgc

SEQ ID NO: 181838 - DNA, 17 bp, synthetic construct
  source 1..17: mol_type = other DNA
aaccctcgtcacacacg

SEQ ID NO: 181839 - DNA, 17 bp, synthetic construct
  source 1..17: mol_type = other DNA
gaaccctcgtcacacac

SEQ ID NO: 181840 - DNA, 17 bp, synthetic construct
  source 1..17: mol_type = other DNA
tgaaccctcgtcacaca

SEQ ID NO: 181841 - DNA, 17 bp, synthetic construct
  source 1..17: mol_type = other DNA
ctgaaccctcgtcacac

SEQ ID NO: 181842 - DNA, 17 bp, synthetic construct
  source 1..17: mol_type = other DNA
actgaaccctcgtcaca

SEQ ID NO: 181843 - DNA, 17 bp, synthetic construct
  source 1..17: mol_type = other DNA
cactgaaccctcgtcac

SEQ ID NO: 181844 - DNA, 17 bp, synthetic construct
  source 1..17: mol_type = other DNA
acactgaaccctcgtca

SEQ ID NO: 181845 - DNA, 17 bp, synthetic construct
  source 1..17: mol_type = other DNA
gacactgaaccctcgtc

SEQ ID NO: 181846 - DNA, 17 bp, synthetic construct
  source 1..17: mol_type = other DNA
cgacactgaaccctcgt

SEQ ID NO: 181847 - DNA, 17 bp, synthetic construct
  source 1..17: mol_type = other DNA
ccgacactgaaccctcg

SEQ ID NO: 181848 - DNA, 17 bp, synthetic construct
  source 1..17: mol_type = other DNA
accgacactgaaccctc

SEQ ID NO: 181849 - DNA, 17 bp, synthetic construct
  source 1..17: mol_type = other DNA
caccgacactgaaccct

SEQ ID NO: 181850 - DNA, 17 bp, synthetic construct
  source 1..17: mol_type = other DNA
gcaccgacactgaaccc

SEQ ID NO: 181851 - DNA, 17 bp, synthetic construct
  source 1..17: mol_type = other DNA
tgcaccgacactgaacc

SEQ ID NO: 181852 - DNA, 17 bp, synthetic construct
  source 1..17: mol_type = other DNA
ctgcaccgacactgaac

SEQ ID NO: 181853 - DNA, 17 bp, synthetic construct
  source 1..17: mol_type = other DNA
actgcaccgacactgaa

SEQ ID NO: 181854 - DNA, 17 bp, synthetic construct
  source 1..17: mol_type = other DNA
cactgcaccgacactga

SEQ ID NO: 181855 - DNA, 17 bp, synthetic construct
  source 1..17: mol_type = other DNA
gcactgcaccgacactg

SEQ ID NO: 181856 - DNA, 17 bp, synthetic construct
  source 1..17: mol_type = other DNA
tgcactgcaccgacact

SEQ ID NO: 181857 - DNA, 17 bp, synthetic construct
  source 1..17: mol_type = other DNA
ttgcactgcaccgacac

SEQ ID NO: 181858 - DNA, 17 bp, synthetic construct
  source 1..17: mol_type = other DNA
cttgcactgcaccgaca

SEQ ID NO: 181859 - DNA, 17 bp, synthetic construct
  source 1..17: mol_type = other DNA
gcttgcactgcaccgac

SEQ ID NO: 181860 - DNA, 17 bp, synthetic construct
  source 1..17: mol_type = other DNA
ggcttgcactgcaccga

SEQ ID NO: 181861 - DNA, 17 bp, synthetic construct
  source 1..17: mol_type = other DNA
gggcttgcactgcaccg

SEQ ID NO: 181862 - DNA, 17 bp, synthetic construct
  source 1..17: mol_type = other DNA
ggggcttgcactgcacc

SEQ ID NO: 181863 - DNA, 17 bp, synthetic construct
  source 1..17: mol_type = other DNA
aggggcttgcactgcac

SEQ ID NO: 181864 - DNA, 17 bp, synthetic construct
  source 1..17: mol_type = other DNA
caggggcttgcactgca

SEQ ID NO: 181865 - DNA, 17 bp, synthetic construct
  source 1..17: mol_type = other DNA
gcaggggcttgcactgc

SEQ ID NO: 181866 - DNA, 17 bp, synthetic construct
  source 1..17: mol_type = other DNA
ggcaggggcttgcactg

SEQ ID NO: 181867 - DNA, 17 bp, synthetic construct
  source 1..17: mol_type = other DNA
gggcaggggcttgcact

SEQ ID NO: 181868 - DNA, 17 bp, synthetic construct
  source 1..17: mol_type = other DNA
agggcaggggcttgcac

SEQ ID NO: 181869 - DNA, 17 bp, synthetic construct
  source 1..17: mol_type = other DNA
cagggcaggggcttgca

SEQ ID NO: 181870 - DNA, 17 bp, synthetic construct
  source 1..17: mol_type = other DNA
acagggcaggggcttgc

SEQ ID NO: 181871 - DNA, 17 bp, synthetic construct
  source 1..17: mol_type = other DNA
cacagggcaggggcttg

SEQ ID NO: 181872 - DNA, 17 bp, synthetic construct
  source 1..17: mol_type = other DNA
tcacagggcaggggctt

SEQ ID NO: 181873 - DNA, 17 bp, synthetic construct
  source 1..17: mol_type = other DNA
gtcacagggcaggggct

SEQ ID NO: 181874 - DNA, 17 bp, synthetic construct
  source 1..17: mol_type = other DNA
cgtcacagggcaggggc

SEQ ID NO: 181875 - DNA, 17 bp, synthetic construct
  source 1..17: mol_type = other DNA
gcgtcacagggcagggg

SEQ ID NO: 181876 - DNA, 17 bp, synthetic construct
  source 1..17: mol_type = other DNA
ggcgtcacagggcaggg

SEQ ID NO: 181877 - DNA, 17 bp, synthetic construct
  source 1..17: mol_type = other DNA
gggcgtcacagggcagg

SEQ ID NO: 181878 - DNA, 17 bp, synthetic construct
  source 1..17: mol_type = other DNA
tgggcgtcacagggcag

SEQ ID NO: 181879 - DNA, 17 bp, synthetic construct
  source 1..17: mol_type = other DNA
ctgggcgtcacagggca

SEQ ID NO: 181880 - DNA, 17 bp, synthetic construct
  source 1..17: mol_type = other DNA
cctgggcgtcacagggc

SEQ ID NO: 181881 - DNA, 17 bp, synthetic construct
  source 1..17: mol_type = other DNA
ccctgggcgtcacaggg

SEQ ID NO: 181882 - DNA, 17 bp, synthetic construct
  source 1..17: mol_type = other DNA
accctgggcgtcacagg

SEQ ID NO: 181883 - DNA, 17 bp, synthetic construct
  source 1..17: mol_type = other DNA
gaccctgggcgtcacag

SEQ ID NO: 181884 - DNA, 17 bp, synthetic construct
  source 1..17: mol_type = other DNA
tgaccctgggcgtcaca

SEQ ID NO: 181885 - DNA, 17 bp, synthetic construct
  source 1..17: mol_type = other DNA
ctgaccctgggcgtcac

SEQ ID NO: 181886 - DNA, 17 bp, synthetic construct
  source 1..17: mol_type = other DNA
gctgaccctgggcgtca

SEQ ID NO: 181887 - DNA, 17 bp, synthetic construct
  source 1..17: mol_type = other DNA
ggctgaccctgggcgtc

SEQ ID NO: 181888 - DNA, 17 bp, synthetic construct
  source 1..17: mol_type = other DNA
gggctgaccctgggcgt

SEQ ID NO: 181889 - DNA, 17 bp, synthetic construct
  source 1..17: mol_type = other DNA
ggggctgaccctgggcg

SEQ ID NO: 181890 - DNA, 17 bp, synthetic construct
  source 1..17: mol_type = other DNA
gggggctgaccctgggc

SEQ ID NO: 181891 - DNA, 17 bp, synthetic construct
  source 1..17: mol_type = other DNA
cgggggctgaccctggg

SEQ ID NO: 181892 - DNA, 17 bp, synthetic construct
  source 1..17: mol_type = other DNA
gcgggggctgaccctgg

SEQ ID NO: 181893 - DNA, 17 bp, synthetic construct
  source 1..17: mol_type = other DNA
ggcgggggctgaccctg

SEQ ID NO: 181894 - DNA, 17 bp, synthetic construct
  source 1..17: mol_type = other DNA
cggcgggggctgaccct

SEQ ID NO: 181895 - DNA, 17 bp, synthetic construct
  source 1..17: mol_type = other DNA
acggcgggggctgaccc

SEQ ID NO: 181896 - DNA, 17 bp, synthetic construct
  source 1..17: mol_type = other DNA
cacggcgggggctgacc

SEQ ID NO: 181897 - DNA, 17 bp, synthetic construct
  source 1..17: mol_type = other DNA
gcacggcgggggctgac

SEQ ID NO: 181898 - DNA, 17 bp, synthetic construct
  source 1..17: mol_type = other DNA
tgcacggcgggggctga

SEQ ID NO: 181899 - DNA, 17 bp, synthetic construct
  source 1..17: mol_type = other DNA
ttgcacggcgggggctg

SEQ ID NO: 181900 - DNA, 17 bp, synthetic construct
  source 1..17: mol_type = other DNA
gttgcacggcgggggct

SEQ ID NO: 181901 - DNA, 17 bp, synthetic construct
  source 1..17: mol_type = other DNA
ggttgcacggcgggggc

SEQ ID NO: 181902 - DNA, 17 bp, synthetic construct
  source 1..17: mol_type = other DNA
cggttgcacggcggggg

SEQ ID NO: 181903 - DNA, 17 bp, synthetic construct
  source 1..17: mol_type = other DNA
acggttgcacggcgggg

SEQ ID NO: 181904 - DNA, 17 bp, synthetic construct
  source 1..17: mol_type = other DNA
gacggttgcacggcggg

SEQ ID NO: 181905 - DNA, 17 bp, synthetic construct
  source 1..17: mol_type = other DNA
ggacggttgcacggcgg

SEQ ID NO: 181906 - DNA, 17 bp, synthetic construct
  source 1..17: mol_type = other DNA
gggacggttgcacggcg

SEQ ID NO: 181907 - DNA, 17 bp, synthetic construct
  source 1..17: mol_type = other DNA
cgggacggttgcacggc

SEQ ID NO: 181908 - DNA, 17 bp, synthetic construct
  source 1..17: mol_type = other DNA
ccgggacggttgcacgg

SEQ ID NO: 181909 - DNA, 17 bp, synthetic construct
  source 1..17: mol_type = other DNA
gccgggacggttgcacg

SEQ ID NO: 181910 - DNA, 17 bp, synthetic construct
  source 1..17: mol_type = other DNA
agccgggacggttgcac

SEQ ID NO: 181911 - DNA, 17 bp, synthetic construct
  source 1..17: mol_type = other DNA
aagccgggacggttgca

SEQ ID NO: 181912 - DNA, 17 bp, synthetic construct
  source 1..17: mol_type = other DNA
gaagccgggacggttgc

SEQ ID NO: 181913 - DNA, 17 bp, synthetic construct
  source 1..17: mol_type = other DNA
cgaagccgggacggttg

SEQ ID NO: 181914 - DNA, 17 bp, synthetic construct
  source 1..17: mol_type = other DNA
acgaagccgggacggtt

SEQ ID NO: 181915 - DNA, 17 bp, synthetic construct
  source 1..17: mol_type = other DNA
tacgaagccgggacggt

SEQ ID NO: 181916 - DNA, 17 bp, synthetic construct
  source 1..17: mol_type = other DNA
ttacgaagccgggacgg

SEQ ID NO: 181917 - DNA, 17 bp, synthetic construct
  source 1..17: mol_type = other DNA
gttacgaagccgggacg

SEQ ID NO: 181918 - DNA, 17 bp, synthetic construct
  source 1..17: mol_type = other DNA
ggttacgaagccgggac

SEQ ID NO: 181919 - DNA, 17 bp, synthetic construct
  source 1..17: mol_type = other DNA
cggttacgaagccggga

SEQ ID NO: 181920 - DNA, 17 bp, synthetic construct
  source 1..17: mol_type = other DNA
acggttacgaagccggg

SEQ ID NO: 181921 - DNA, 17 bp, synthetic construct
  source 1..17: mol_type = other DNA
cacggttacgaagccgg

SEQ ID NO: 181922 - DNA, 17 bp, synthetic construct
  source 1..17: mol_type = other DNA
tcacggttacgaagccg

SEQ ID NO: 181923 - DNA, 17 bp, synthetic construct
  source 1..17: mol_type = other DNA
gtcacggttacgaagcc

SEQ ID NO: 181924 - DNA, 17 bp, synthetic construct
  source 1..17: mol_type = other DNA
ggtcacggttacgaagc

SEQ ID NO: 181925 - DNA, 17 bp, synthetic construct
  source 1..17: mol_type = other DNA
tggtcacggttacgaag

SEQ ID NO: 181926 - DNA, 17 bp, synthetic construct
  source 1..17: mol_type = other DNA
ctggtcacggttacgaa

SEQ ID NO: 181927 - DNA, 17 bp, synthetic construct
  source 1..17: mol_type = other DNA
cctggtcacggttacga

SEQ ID NO: 181928 - DNA, 17 bp, synthetic construct
  source 1..17: mol_type = other DNA
gcctggtcacggttacg

SEQ ID NO: 181929 - DNA, 17 bp, synthetic construct
  source 1..17: mol_type = other DNA
ggcctggtcacggttac

SEQ ID NO: 181930 - DNA, 17 bp, synthetic construct
  source 1..17: mol_type = other DNA
gggcctggtcacggtta

SEQ ID NO: 181931 - DNA, 17 bp, synthetic construct
  source 1..17: mol_type = other DNA
ggggcctggtcacggtt

SEQ ID NO: 181932 - DNA, 17 bp, synthetic construct
  source 1..17: mol_type = other DNA
cggggcctggtcacggt

SEQ ID NO: 181933 - DNA, 17 bp, synthetic construct
  source 1..17: mol_type = other DNA
ccggggcctggtcacgg

SEQ ID NO: 181934 - DNA, 17 bp, synthetic construct
  source 1..17: mol_type = other DNA
cccggggcctggtcacg

SEQ ID NO: 181935 - DNA, 17 bp, synthetic construct
  source 1..17: mol_type = other DNA
gcccggggcctggtcac

SEQ ID NO: 181936 - DNA, 17 bp, synthetic construct
  source 1..17: mol_type = other DNA
ggcccggggcctggtca

SEQ ID NO: 181937 - DNA, 17 bp, synthetic construct
  source 1..17: mol_type = other DNA
cggcccggggcctggtc

SEQ ID NO: 181938 - DNA, 17 bp, synthetic construct
  source 1..17: mol_type = other DNA
tcggcccggggcctggt

SEQ ID NO: 181939 - DNA, 17 bp, synthetic construct
  source 1..17: mol_type = other DNA
ctcggcccggggcctgg

SEQ ID NO: 181940 - DNA, 17 bp, synthetic construct
  source 1..17: mol_type = other DNA
tctcggcccggggcctg

SEQ ID NO: 181941 - DNA, 17 bp, synthetic construct
  source 1..17: mol_type = other DNA
ttctcggcccggggcct

SEQ ID NO: 181942 - DNA, 17 bp, synthetic construct
  source 1..17: mol_type = other DNA
gttctcggcccggggcc

SEQ ID NO: 181943 - DNA, 17 bp, synthetic construct
  source 1..17: mol_type = other DNA
ggttctcggcccggggc

SEQ ID NO: 181944 - DNA, 17 bp, synthetic construct
  source 1..17: mol_type = other DNA
gggttctcggcccgggg

SEQ ID NO: 181945 - DNA, 17 bp, synthetic construct
  source 1..17: mol_type = other DNA
ggggttctcggcccggg

SEQ ID NO: 181946 - DNA, 17 bp, synthetic construct
  source 1..17: mol_type = other DNA
aggggttctcggcccgg

SEQ ID NO: 181947 - DNA, 17 bp, synthetic construct
  source 1..17: mol_type = other DNA
caggggttctcggcccg

SEQ ID NO: 181948 - DNA, 17 bp, synthetic construct
  source 1..17: mol_type = other DNA
gcaggggttctcggccc

SEQ ID NO: 181949 - DNA, 17 bp, synthetic construct
  source 1..17: mol_type = other DNA
agcaggggttctcggcc

SEQ ID NO: 181950 - DNA, 17 bp, synthetic construct
  source 1..17: mol_type = other DNA
cagcaggggttctcggc

SEQ ID NO: 181951 - DNA, 17 bp, synthetic construct
  source 1..17: mol_type = other DNA
gcagcaggggttctcgg

SEQ ID NO: 181952 - DNA, 17 bp, synthetic construct
  source 1..17: mol_type = other DNA
ggcagcaggggttctcg

SEQ ID NO: 181953 - DNA, 17 bp, synthetic construct
  source 1..17: mol_type = other DNA
gggcagcaggggttctc

SEQ ID NO: 181954 - DNA, 17 bp, synthetic construct
  source 1..17: mol_type = other DNA
ggggcagcaggggttct

SEQ ID NO: 181955 - DNA, 17 bp, synthetic construct
  source 1..17: mol_type = other DNA
cggggcagcaggggttc

SEQ ID NO: 181956 - DNA, 17 bp, synthetic construct
  source 1..17: mol_type = other DNA
tcggggcagcaggggtt

SEQ ID NO: 181957 - DNA, 17 bp, synthetic construct
  source 1..17: mol_type = other DNA
ctcggggcagcaggggt

SEQ ID NO: 181958 - DNA, 17 bp, synthetic construct
  source 1..17: mol_type = other DNA
tctcggggcagcagggg

SEQ ID NO: 181959 - DNA, 17 bp, synthetic construct
  source 1..17: mol_type = other DNA
gtctcggggcagcaggg

SEQ ID NO: 181960 - DNA, 17 bp, synthetic construct
  source 1..17: mol_type = other DNA
cgtctcggggcagcagg

SEQ ID NO: 181961 - DNA, 17 bp, synthetic construct
  source 1..17: mol_type = other DNA
ccgtctcggggcagcag

SEQ ID NO: 181962 - DNA, 17 bp, synthetic construct
  source 1..17: mol_type = other DNA
accgtctcggggcagca

SEQ ID NO: 181963 - DNA, 17 bp, synthetic construct
  source 1..17: mol_type = other DNA
caccgtctcggggcagc

SEQ ID NO: 181964 - DNA, 17 bp, synthetic construct
  source 1..17: mol_type = other DNA
acaccgtctcggggcag

SEQ ID NO: 181965 - DNA, 17 bp, synthetic construct
  source 1..17: mol_type = other DNA
cacaccgtctcggggca

SEQ ID NO: 181966 - DNA, 17 bp, synthetic construct
  source 1..17: mol_type = other DNA
gcacaccgtctcggggc

SEQ ID NO: 181967 - DNA, 17 bp, synthetic construct
  source 1..17: mol_type = other DNA
cgcacaccgtctcgggg

SEQ ID NO: 181968 - DNA, 17 bp, synthetic construct
  source 1..17: mol_type = other DNA
ccgcacaccgtctcggg

SEQ ID NO: 181969 - DNA, 17 bp, synthetic construct
  source 1..17: mol_type = other DNA
accgcacaccgtctcgg

SEQ ID NO: 181970 - DNA, 17 bp, synthetic construct
  source 1..17: mol_type = other DNA
taccgcacaccgtctcg

SEQ ID NO: 181971 - DNA, 17 bp, synthetic construct
  source 1..17: mol_type = other DNA
ttaccgcacaccgtctc

SEQ ID NO: 181972 - DNA, 17 bp, synthetic construct
  source 1..17: mol_type = other DNA
cttaccgcacaccgtct

SEQ ID NO: 181973 - DNA, 17 bp, synthetic construct
  source 1..17: mol_type = other DNA
tcttaccgcacaccgtc

SEQ ID NO: 181974 - DNA, 17 bp, synthetic construct
  source 1..17: mol_type = other DNA
gtcttaccgcacaccgt

SEQ ID NO: 181975 - DNA, 17 bp, synthetic construct
  source 1..17: mol_type = other DNA
cgtcttaccgcacaccg

SEQ ID NO: 181976 - DNA, 17 bp, synthetic construct
  source 1..17: mol_type = other DNA
gcgtcttaccgcacacc

SEQ ID NO: 181977 - DNA, 17 bp, synthetic construct
  source 1..17: mol_type = other DNA
agcgtcttaccgcacac

SEQ ID NO: 181978 - DNA, 17 bp, synthetic construct
  source 1..17: mol_type = other DNA
cagcgtcttaccgcaca

SEQ ID NO: 181979 - DNA, 17 bp, synthetic construct
  source 1..17: mol_type = other DNA
gcagcgtcttaccgcac

SEQ ID NO: 181980 - DNA, 17 bp, synthetic construct
  source 1..17: mol_type = other DNA
tgcagcgtcttaccgca

SEQ ID NO: 181981 - DNA, 17 bp, synthetic construct
  source 1..17: mol_type = other DNA
ctgcagcgtcttaccgc

SEQ ID NO: 181982 - DNA, 17 bp, synthetic construct
  source 1..17: mol_type = other DNA
tctgcagcgtcttaccg

SEQ ID NO: 181983 - DNA, 17 bp, synthetic construct
  source 1..17: mol_type = other DNA
ctctgcagcgtcttacc

SEQ ID NO: 181984 - DNA, 17 bp, synthetic construct
  source 1..17: mol_type = other DNA
gctctgcagcgtcttac

SEQ ID NO: 181985 - DNA, 17 bp, synthetic construct
  source 1..17: mol_type = other DNA
tgctctgcagcgtctta

SEQ ID NO: 181986 - DNA, 17 bp, synthetic construct
  source 1..17: mol_type = other DNA
ctgctctgcagcgtctt

SEQ ID NO: 181987 - DNA, 17 bp, synthetic construct
  source 1..17: mol_type = other DNA
tctgctctgcagcgtct

SEQ ID NO: 181988 - DNA, 17 bp, synthetic construct
  source 1..17: mol_type = other DNA
ctctgctctgcagcgtc

SEQ ID NO: 181989 - DNA, 17 bp, synthetic construct
  source 1..17: mol_type = other DNA
cctctgctctgcagcgt

SEQ ID NO: 181990 - DNA, 17 bp, synthetic construct
  source 1..17: mol_type = other DNA
acctctgctctgcagcg

SEQ ID NO: 181991 - DNA, 17 bp, synthetic construct
  source 1..17: mol_type = other DNA
cacctctgctctgcagc

SEQ ID NO: 181992 - DNA, 17 bp, synthetic construct
  source 1..17: mol_type = other DNA
gcacctctgctctgcag

SEQ ID NO: 181993 - DNA, 17 bp, synthetic construct
  source 1..17: mol_type = other DNA
ggcacctctgctctgca

SEQ ID NO: 181994 - DNA, 17 bp, synthetic construct
  source 1..17: mol_type = other DNA
gggcacctctgctctgc

SEQ ID NO: 181995 - DNA, 17 bp, synthetic construct
  source 1..17: mol_type = other DNA
cgggcacctctgctctg

SEQ ID NO: 181996 - DNA, 17 bp, synthetic construct
  source 1..17: mol_type = other DNA
ccgggcacctctgctct

SEQ ID NO: 181997 - DNA, 17 bp, synthetic construct
  source 1..17: mol_type = other DNA
gccgggcacctctgctc

SEQ ID NO: 181998 - DNA, 17 bp, synthetic construct
  source 1..17: mol_type = other DNA
tgccgggcacctctgct

SEQ ID NO: 181999 - DNA, 17 bp, synthetic construct
  source 1..17: mol_type = other DNA
atgccgggcacctctgc

SEQ ID NO: 182000 - DNA, 17 bp, synthetic construct
  source 1..17: mol_type = other DNA
tatgccgggcacctctg

SEQ ID NO: 182001 - DNA, 17 bp, synthetic construct
  source 1..17: mol_type = other DNA
ctatgccgggcacctct

SEQ ID NO: 182002 - DNA, 17 bp, synthetic construct
  source 1..17: mol_type = other DNA
cctatgccgggcacctc

SEQ ID NO: 182003 - DNA, 17 bp, synthetic construct
  source 1..17: mol_type = other DNA
ccctatgccgggcacct

SEQ ID NO: 182004 - DNA, 17 bp, synthetic construct
  source 1..17: mol_type = other DNA
accctatgccgggcacc

SEQ ID NO: 182005 - DNA, 17 bp, synthetic construct
  source 1..17: mol_type = other DNA
caccctatgccgggcac

SEQ ID NO: 182006 - DNA, 17 bp, synthetic construct
  source 1..17: mol_type = other DNA
tcaccctatgccgggca

SEQ ID NO: 182007 - DNA, 17 bp, synthetic construct
  source 1..17: mol_type = other DNA
ctcaccctatgccgggc

SEQ ID NO: 182008 - DNA, 17 bp, synthetic construct
  source 1..17: mol_type = other DNA
cctcaccctatgccggg

SEQ ID NO: 182009 - DNA, 17 bp, synthetic construct
  source 1..17: mol_type = other DNA
ccctcaccctatgccgg

SEQ ID NO: 182010 - DNA, 17 bp, synthetic construct
  source 1..17: mol_type = other DNA
cccctcaccctatgccg

SEQ ID NO: 182011 - DNA, 17 bp, synthetic construct
  source 1..17: mol_type = other DNA
ccccctcaccctatgcc

SEQ ID NO: 182012 - DNA, 17 bp, synthetic construct
  source 1..17: mol_type = other DNA
cccccctcaccctatgc

SEQ ID NO: 182013 - DNA, 17 bp, synthetic construct
  source 1..17: mol_type = other DNA
tcccccctcaccctatg

SEQ ID NO: 182014 - DNA, 17 bp, synthetic construct
  source 1..17: mol_type = other DNA
gtcccccctcaccctat

SEQ ID NO: 182015 - DNA, 17 bp, synthetic construct
  source 1..17: mol_type = other DNA
tgtcccccctcacccta

SEQ ID NO: 182016 - DNA, 17 bp, synthetic construct
  source 1..17: mol_type = other DNA
ctgtcccccctcaccct

SEQ ID NO: 182017 - DNA, 17 bp, synthetic construct
  source 1..17: mol_type = other DNA
tctgtcccccctcaccc

SEQ ID NO: 182018 - DNA, 17 bp, synthetic construct
  source 1..17: mol_type = other DNA
ctctgtcccccctcacc

SEQ ID NO: 182019 - DNA, 17 bp, synthetic construct
  source 1..17: mol_type = other DNA
gctctgtcccccctcac

SEQ ID NO: 182020 - DNA, 17 bp, synthetic construct
  source 1..17: mol_type = other DNA
ggctctgtcccccctca

SEQ ID NO: 182021 - DNA, 17 bp, synthetic construct
  source 1..17: mol_type = other DNA
cggctctgtcccccctc

SEQ ID NO: 182022 - DNA, 17 bp, synthetic construct
  source 1..17: mol_type = other DNA
ccggctctgtcccccct

SEQ ID NO: 182023 - DNA, 17 bp, synthetic construct
  source 1..17: mol_type = other DNA
accggctctgtcccccc

SEQ ID NO: 182024 - DNA, 17 bp, synthetic construct
  source 1..17: mol_type = other DNA
caccggctctgtccccc

SEQ ID NO: 182025 - DNA, 17 bp, synthetic construct
  source 1..17: mol_type = other DNA
gcaccggctctgtcccc

SEQ ID NO: 182026 - DNA, 17 bp, synthetic construct
  source 1..17: mol_type = other DNA
ggcaccggctctgtccc

SEQ ID NO: 182027 - DNA, 17 bp, synthetic construct
  source 1..17: mol_type = other DNA
gggcaccggctctgtcc

SEQ ID NO: 182028 - DNA, 17 bp, synthetic construct
  source 1..17: mol_type = other DNA
tgggcaccggctctgtc

SEQ ID NO: 182029 - DNA, 17 bp, synthetic construct
  source 1..17: mol_type = other DNA
gtgggcaccggctctgt

SEQ ID NO: 182030 - DNA, 17 bp, synthetic construct
  source 1..17: mol_type = other DNA
ggtgggcaccggctctg

SEQ ID NO: 182031 - DNA, 17 bp, synthetic construct
  source 1..17: mol_type = other DNA
tggtgggcaccggctct

SEQ ID NO: 182032 - DNA, 17 bp, synthetic construct
  source 1..17: mol_type = other DNA
ctggtgggcaccggctc

SEQ ID NO: 182033 - DNA, 17 bp, synthetic construct
  source 1..17: mol_type = other DNA
cctggtgggcaccggct

SEQ ID NO: 182034 - DNA, 17 bp, synthetic construct
  source 1..17: mol_type = other DNA
ccctggtgggcaccggc

SEQ ID NO: 182035 - DNA, 17 bp, synthetic construct
  source 1..17: mol_type = other DNA
cccctggtgggcaccgg

SEQ ID NO: 182036 - DNA, 17 bp, synthetic construct
  source 1..17: mol_type = other DNA
gcccctggtgggcaccg

SEQ ID NO: 182037 - DNA, 17 bp, synthetic construct
  source 1..17: mol_type = other DNA
ggcccctggtgggcacc

SEQ ID NO: 182038 - DNA, 17 bp, synthetic construct
  source 1..17: mol_type = other DNA
aggcccctggtgggcac

SEQ ID NO: 182039 - DNA, 17 bp, synthetic construct
  source 1..17: mol_type = other DNA
caggcccctggtgggca

SEQ ID NO: 182040 - DNA, 17 bp, synthetic construct
  source 1..17: mol_type = other DNA
acaggcccctggtgggc

SEQ ID NO: 182041 - DNA, 17 bp, synthetic construct
  source 1..17: mol_type = other DNA
cacaggcccctggtggg

SEQ ID NO: 182042 - DNA, 17 bp, synthetic construct
  source 1..17: mol_type = other DNA
ccacaggcccctggtgg

SEQ ID NO: 182043 - DNA, 17 bp, synthetic construct
  source 1..17: mol_type = other DNA
cccacaggcccctggtg

SEQ ID NO: 182044 - DNA, 17 bp, synthetic construct
  source 1..17: mol_type = other DNA
acccacaggcccctggt

SEQ ID NO: 182045 - DNA, 17 bp, synthetic construct
  source 1..17: mol_type = other DNA
aacccacaggcccctgg

SEQ ID NO: 182046 - DNA, 17 bp, synthetic construct
  source 1..17: mol_type = other DNA
caacccacaggcccctg

SEQ ID NO: 182047 - DNA, 17 bp, synthetic construct
  source 1..17: mol_type = other DNA
ccaacccacaggcccct

SEQ ID NO: 182048 - DNA, 17 bp, synthetic construct
  source 1..17: mol_type = other DNA
cccaacccacaggcccc

SEQ ID NO: 182049 - DNA, 17 bp, synthetic construct
  source 1..17: mol_type = other DNA
gcccaacccacaggccc

SEQ ID NO: 182050 - DNA, 17 bp, synthetic construct
  source 1..17: mol_type = other DNA
tgcccaacccacaggcc

SEQ ID NO: 182051 - DNA, 17 bp, synthetic construct
  source 1..17: mol_type = other DNA
gtgcccaacccacaggc

SEQ ID NO: 182052 - DNA, 17 bp, synthetic construct
  source 1..17: mol_type = other DNA
tgtgcccaacccacagg

SEQ ID NO: 182053 - DNA, 17 bp, synthetic construct
  source 1..17: mol_type = other DNA
ctgtgcccaacccacag

SEQ ID NO: 182054 - DNA, 17 bp, synthetic construct
  source 1..17: mol_type = other DNA
cctgtgcccaacccaca

SEQ ID NO: 182055 - DNA, 17 bp, synthetic construct
  source 1..17: mol_type = other DNA
tcctgtgcccaacccac

SEQ ID NO: 182056 - DNA, 17 bp, synthetic construct
  source 1..17: mol_type = other DNA
ctcctgtgcccaaccca

SEQ ID NO: 182057 - DNA, 17 bp, synthetic construct
  source 1..17: mol_type = other DNA
tctcctgtgcccaaccc

SEQ ID NO: 182058 - DNA, 17 bp, synthetic construct
  source 1..17: mol_type = other DNA
ctctcctgtgcccaacc

SEQ ID NO: 182059 - DNA, 17 bp, synthetic construct
  source 1..17: mol_type = other DNA
gctctcctgtgcccaac

SEQ ID NO: 182060 - DNA, 17 bp, synthetic construct
  source 1..17: mol_type = other DNA
tgctctcctgtgcccaa

SEQ ID NO: 182061 - DNA, 17 bp, synthetic construct
  source 1..17: mol_type = other DNA
ctgctctcctgtgccca

SEQ ID NO: 182062 - DNA, 17 bp, synthetic construct
  source 1..17: mol_type = other DNA
tctgctctcctgtgccc

SEQ ID NO: 182063 - DNA, 17 bp, synthetic construct
  source 1..17: mol_type = other DNA
ctctgctctcctgtgcc

SEQ ID NO: 182064 - DNA, 17 bp, synthetic construct
  source 1..17: mol_type = other DNA
cctctgctctcctgtgc

SEQ ID NO: 182065 - DNA, 17 bp, synthetic construct
  source 1..17: mol_type = other DNA
tcctctgctctcctgtg

SEQ ID NO: 182066 - DNA, 17 bp, synthetic construct
  source 1..17: mol_type = other DNA
ctcctctgctctcctgt

SEQ ID NO: 182067 - DNA, 17 bp, synthetic construct
  source 1..17: mol_type = other DNA
tctcctctgctctcctg

SEQ ID NO: 182068 - DNA, 17 bp, synthetic construct
  source 1..17: mol_type = other DNA
ctctcctctgctctcct

SEQ ID NO: 182069 - DNA, 17 bp, synthetic construct
  source 1..17: mol_type = other DNA
gctctcctctgctctcc

SEQ ID NO: 182070 - DNA, 17 bp, synthetic construct
  source 1..17: mol_type = other DNA
ggctctcctctgctctc

SEQ ID NO: 182071 - DNA, 17 bp, synthetic construct
  source 1..17: mol_type = other DNA
tggctctcctctgctct

SEQ ID NO: 182072 - DNA, 17 bp, synthetic construct
  source 1..17: mol_type = other DNA
gtggctctcctctgctc

SEQ ID NO: 182073 - DNA, 17 bp, synthetic construct
  source 1..17: mol_type = other DNA
agtggctctcctctgct

SEQ ID NO: 182074 - DNA, 17 bp, synthetic construct
  source 1..17: mol_type = other DNA
cagtggctctcctctgc

SEQ ID NO: 182075 - DNA, 17 bp, synthetic construct
  source 1..17: mol_type = other DNA
acagtggctctcctctg

SEQ ID NO: 182076 - DNA, 17 bp, synthetic construct
  source 1..17: mol_type = other DNA
cacagtggctctcctct

SEQ ID NO: 182077 - DNA, 17 bp, synthetic construct
  source 1..17: mol_type = other DNA
acacagtggctctcctc

SEQ ID NO: 182078 - DNA, 17 bp, synthetic construct
  source 1..17: mol_type = other DNA
gacacagtggctctcct

SEQ ID NO: 182079 - DNA, 17 bp, synthetic construct
  source 1..17: mol_type = other DNA
ggacacagtggctctcc

SEQ ID NO: 182080 - DNA, 17 bp, synthetic construct
  source 1..17: mol_type = other DNA
aggacacagtggctctc

SEQ ID NO: 182081 - DNA, 17 bp, synthetic construct
  source 1..17: mol_type = other DNA
caggacacagtggctct

SEQ ID NO: 182082 - DNA, 17 bp, synthetic construct
  source 1..17: mol_type = other DNA
ccaggacacagtggctc

SEQ ID NO: 182083 - DNA, 17 bp, synthetic construct
  source 1..17: mol_type = other DNA
gccaggacacagtggct

SEQ ID NO: 182084 - DNA, 17 bp, synthetic construct
  source 1..17: mol_type = other DNA
cgccaggacacagtggc

SEQ ID NO: 182085 - DNA, 17 bp, synthetic construct
  source 1..17: mol_type = other DNA
acgccaggacacagtgg

SEQ ID NO: 182086 - DNA, 17 bp, synthetic construct
  source 1..17: mol_type = other DNA
cacgccaggacacagtg

SEQ ID NO: 182087 - DNA, 17 bp, synthetic construct
  source 1..17: mol_type = other DNA
tcacgccaggacacagt

SEQ ID NO: 182088 - DNA, 17 bp, synthetic construct
  source 1..17: mol_type = other DNA
gtcacgccaggacacag

SEQ ID NO: 182089 - DNA, 17 bp, synthetic construct
  source 1..17: mol_type = other DNA
ggtcacgccaggacaca

SEQ ID NO: 182090 - DNA, 17 bp, synthetic construct
  source 1..17: mol_type = other DNA
cggtcacgccaggacac

SEQ ID NO: 182091 - DNA, 17 bp, synthetic construct
  source 1..17: mol_type = other DNA
gcggtcacgccaggaca

SEQ ID NO: 182092 - DNA, 17 bp, synthetic construct
  source 1..17: mol_type = other DNA
cgcggtcacgccaggac

SEQ ID NO: 182093 - DNA, 17 bp, synthetic construct
  source 1..17: mol_type = other DNA
ccgcggtcacgccagga

SEQ ID NO: 182094 - DNA, 17 bp, synthetic construct
  source 1..17: mol_type = other DNA
gccgcggtcacgccagg

SEQ ID NO: 182095 - DNA, 17 bp, synthetic construct
  source 1..17: mol_type = other DNA
tgccgcggtcacgccag

SEQ ID NO: 182096 - DNA, 17 bp, synthetic construct
  source 1..17: mol_type = other DNA
ctgccgcggtcacgcca

SEQ ID NO: 182097 - DNA, 17 bp, synthetic construct
  source 1..17: mol_type = other DNA
cctgccgcggtcacgcc

SEQ ID NO: 182098 - DNA, 17 bp, synthetic construct
  source 1..17: mol_type = other DNA
tcctgccgcggtcacgc

SEQ ID NO: 182099 - DNA, 17 bp, synthetic construct
  source 1..17: mol_type = other DNA
gtcctgccgcggtcacg

SEQ ID NO: 182100 - DNA, 17 bp, synthetic construct
  source 1..17: mol_type = other DNA
ggtcctgccgcggtcac

SEQ ID NO: 182101 - DNA, 17 bp, synthetic construct
  source 1..17: mol_type = other DNA
tggtcctgccgcggtca

SEQ ID NO: 182102 - DNA, 17 bp, synthetic construct
  source 1..17: mol_type = other DNA
gtggtcctgccgcggtc

SEQ ID NO: 182103 - DNA, 17 bp, synthetic construct
  source 1..17: mol_type = other DNA
agtggtcctgccgcggt

SEQ ID NO: 182104 - DNA, 17 bp, synthetic construct
  source 1..17: mol_type = other DNA
gagtggtcctgccgcgg

SEQ ID NO: 182105 - DNA, 17 bp, synthetic construct
  source 1..17: mol_type = other DNA
cgagtggtcctgccgcg

SEQ ID NO: 182106 - DNA, 17 bp, synthetic construct
  source 1..17: mol_type = other DNA
ccgagtggtcctgccgc

SEQ ID NO: 182107 - DNA, 17 bp, synthetic construct
  source 1..17: mol_type = other DNA
gccgagtggtcctgccg

SEQ ID NO: 182108 - DNA, 17 bp, synthetic construct
  source 1..17: mol_type = other DNA
tgccgagtggtcctgcc

SEQ ID NO: 182109 - DNA, 17 bp, synthetic construct
  source 1..17: mol_type = other DNA
ctgccgagtggtcctgc

SEQ ID NO: 182110 - DNA, 17 bp, synthetic construct
  source 1..17: mol_type = other DNA
tctgccgagtggtcctg

SEQ ID NO: 182111 - DNA, 17 bp, synthetic construct
  source 1..17: mol_type = other DNA
ctctgccgagtggtcct

SEQ ID NO: 182112 - DNA, 17 bp, synthetic construct
  source 1..17: mol_type = other DNA
tctctgccgagtggtcc

SEQ ID NO: 182113 - DNA, 17 bp, synthetic construct
  source 1..17: mol_type = other DNA
atctctgccgagtggtc

SEQ ID NO: 182114 - DNA, 17 bp, synthetic construct
  source 1..17: mol_type = other DNA
catctctgccgagtggt

SEQ ID NO: 182115 - DNA, 17 bp, synthetic construct
  source 1..17: mol_type = other DNA
ccatctctgccgagtgg

SEQ ID NO: 182116 - DNA, 17 bp, synthetic construct
  source 1..17: mol_type = other DNA
gccatctctgccgagtg

SEQ ID NO: 182117 - DNA, 17 bp, synthetic construct
  source 1..17: mol_type = other DNA
ggccatctctgccgagt

SEQ ID NO: 182118 - DNA, 17 bp, synthetic construct
  source 1..17: mol_type = other DNA
aggccatctctgccgag

SEQ ID NO: 182119 - DNA, 17 bp, synthetic construct
  source 1..17: mol_type = other DNA
gaggccatctctgccga

SEQ ID NO: 182120 - DNA, 17 bp, synthetic construct
  source 1..17: mol_type = other DNA
ggaggccatctctgccg

SEQ ID NO: 182121 - DNA, 17 bp, synthetic construct
  source 1..17: mol_type = other DNA
tggaggccatctctgcc

SEQ ID NO: 182122 - DNA, 17 bp, synthetic construct
  source 1..17: mol_type = other DNA
ctggaggccatctctgc

SEQ ID NO: 182123 - DNA, 17 bp, synthetic construct
  source 1..17: mol_type = other DNA
cctggaggccatctctg

SEQ ID NO: 182124 - DNA, 17 bp, synthetic construct
  source 1..17: mol_type = other DNA
acctggaggccatctct

SEQ ID NO: 182125 - DNA, 17 bp, synthetic construct
  source 1..17: mol_type = other DNA
cacctggaggccatctc

SEQ ID NO: 182126 - DNA, 17 bp, synthetic construct
  source 1..17: mol_type = other DNA
gcacctggaggccatct

SEQ ID NO: 182127 - DNA, 17 bp, synthetic construct
  source 1..17: mol_type = other DNA
agcacctggaggccatc

SEQ ID NO: 182128 - DNA, 17 bp, synthetic construct
  source 1..17: mol_type = other DNA
aagcacctggaggccat

SEQ ID NO: 182129 - DNA, 17 bp, synthetic construct
  source 1..17: mol_type = other DNA
gaagcacctggaggcca

SEQ ID NO: 182130 - DNA, 17 bp, synthetic construct
  source 1..17: mol_type = other DNA
tgaagcacctggaggcc

SEQ ID NO: 182131 - DNA, 17 bp, synthetic construct
  source 1..17: mol_type = other DNA
atgaagcacctggaggc

SEQ ID NO: 182132 - DNA, 17 bp, synthetic construct
  source 1..17: mol_type = other DNA
aatgaagcacctggagg

SEQ ID NO: 182133 - DNA, 17 bp, synthetic construct
  source 1..17: mol_type = other DNA
gaatgaagcacctggag

SEQ ID NO: 182134 - DNA, 17 bp, synthetic construct
  source 1..17: mol_type = other DNA
agaatgaagcacctgga

SEQ ID NO: 182135 - DNA, 17 bp, synthetic construct
  source 1..17: mol_type = other DNA
gagaatgaagcacctgg

SEQ ID NO: 182136 - DNA, 17 bp, synthetic construct
  source 1..17: mol_type = other DNA
ggagaatgaagcacctg

SEQ ID NO: 182137 - DNA, 17 bp, synthetic construct
  source 1..17: mol_type = other DNA
aggagaatgaagcacct

SEQ ID NO: 182138 - DNA, 17 bp, synthetic construct
  source 1..17: mol_type = other DNA
gaggagaatgaagcacc

SEQ ID NO: 182139 - DNA, 17 bp, synthetic construct
  source 1..17: mol_type = other DNA
ggaggagaatgaagcac

SEQ ID NO: 182140 - DNA, 17 bp, synthetic construct
  source 1..17: mol_type = other DNA
aggaggagaatgaagca

SEQ ID NO: 182141 - DNA, 17 bp, synthetic construct
  source 1..17: mol_type = other DNA
taggaggagaatgaagc

SEQ ID NO: 182142 - DNA, 17 bp, synthetic construct
  source 1..17: mol_type = other DNA
ttaggaggagaatgaag

SEQ ID NO: 182143 - DNA, 17 bp, synthetic construct
  source 1..17: mol_type = other DNA
gttaggaggagaatgaa

SEQ ID NO: 182144 - DNA, 17 bp, synthetic construct
  source 1..17: mol_type = other DNA
cgttaggaggagaatga

SEQ ID NO: 182145 - DNA, 17 bp, synthetic construct
  source 1..17: mol_type = other DNA
tcgttaggaggagaatg

SEQ ID NO: 182146 - DNA, 17 bp, synthetic construct
  source 1..17: mol_type = other DNA
atcgttaggaggagaat

SEQ ID NO: 182147 - DNA, 17 bp, synthetic construct
  source 1..17: mol_type = other DNA
catcgttaggaggagaa

SEQ ID NO: 182148 - DNA, 17 bp, synthetic construct
  source 1..17: mol_type = other DNA
tcatcgttaggaggaga

SEQ ID NO: 182149 - DNA, 17 bp, synthetic construct
  source 1..17: mol_type = other DNA
ctcatcgttaggaggag

SEQ ID NO: 182150 - DNA, 17 bp, synthetic construct
  source 1..17: mol_type = other DNA
cctcatcgttaggagga

SEQ ID NO: 182151 - DNA, 17 bp, synthetic construct
  source 1..17: mol_type = other DNA
gcctcatcgttaggagg

SEQ ID NO: 182152 - DNA, 17 bp, synthetic construct
  source 1..17: mol_type = other DNA
agcctcatcgttaggag

SEQ ID NO: 182153 - DNA, 17 bp, synthetic construct
  source 1..17: mol_type = other DNA
cagcctcatcgttagga

SEQ ID NO: 182154 - DNA, 17 bp, synthetic construct
  source 1..17: mol_type = other DNA
ccagcctcatcgttagg

SEQ ID NO: 182155 - DNA, 17 bp, synthetic construct
  source 1..17: mol_type = other DNA
accagcctcatcgttag

SEQ ID NO: 182156 - DNA, 17 bp, synthetic construct
  source 1..17: mol_type = other DNA
caccagcctcatcgtta

SEQ ID NO: 182157 - DNA, 17 bp, synthetic construct
  source 1..17: mol_type = other DNA
tcaccagcctcatcgtt

SEQ ID NO: 182158 - DNA, 17 bp, synthetic construct
  source 1..17: mol_type = other DNA
gtcaccagcctcatcgt

SEQ ID NO: 182159 - DNA, 17 bp, synthetic construct
  source 1..17: mol_type = other DNA
ggtcaccagcctcatcg

SEQ ID NO: 182160 - DNA, 17 bp, synthetic construct
  source 1..17: mol_type = other DNA
aggtcaccagcctcatc

SEQ ID NO: 182161 - DNA, 17 bp, synthetic construct
  source 1..17: mol_type = other DNA
gaggtcaccagcctcat

SEQ ID NO: 182162 - DNA, 17 bp, synthetic construct
  source 1..17: mol_type = other DNA
agaggtcaccagcctca

SEQ ID NO: 182163 - DNA, 17 bp, synthetic construct
  source 1..17: mol_type = other DNA
cagaggtcaccagcctc

SEQ ID NO: 182164 - DNA, 17 bp, synthetic construct
  source 1..17: mol_type = other DNA
ccagaggtcaccagcct

SEQ ID NO: 182165 - DNA, 17 bp, synthetic construct
  source 1..17: mol_type = other DNA
gccagaggtcaccagcc

SEQ ID NO: 182166 - DNA, 17 bp, synthetic construct
  source 1..17: mol_type = other DNA
ggccagaggtcaccagc

SEQ ID NO: 182167 - DNA, 17 bp, synthetic construct
  source 1..17: mol_type = other DNA
aggccagaggtcaccag

SEQ ID NO: 182168 - DNA, 17 bp, synthetic construct
  source 1..17: mol_type = other DNA
caggccagaggtcacca

SEQ ID NO: 182169 - DNA, 17 bp, synthetic construct
  source 1..17: mol_type = other DNA
gcaggccagaggtcacc

SEQ ID NO: 182170 - DNA, 17 bp, synthetic construct
  source 1..17: mol_type = other DNA
ggcaggccagaggtcac

SEQ ID NO: 182171 - DNA, 17 bp, synthetic construct
  source 1..17: mol_type = other DNA
gggcaggccagaggtca

SEQ ID NO: 182172 - DNA, 17 bp, synthetic construct
  source 1..17: mol_type = other DNA
tgggcaggccagaggtc

SEQ ID NO: 182173 - DNA, 17 bp, synthetic construct
  source 1..17: mol_type = other DNA
ctgggcaggccagaggt

SEQ ID NO: 182174 - DNA, 17 bp, synthetic construct
  source 1..17: mol_type = other DNA
cctgggcaggccagagg

SEQ ID NO: 182175 - DNA, 17 bp, synthetic construct
  source 1..17: mol_type = other DNA
tcctgggcaggccagag

SEQ ID NO: 182176 - DNA, 17 bp, synthetic construct
  source 1..17: mol_type = other DNA
ctcctgggcaggccaga

SEQ ID NO: 182177 - DNA, 17 bp, synthetic construct
  source 1..17: mol_type = other DNA
actcctgggcaggccag

SEQ ID NO: 182178 - DNA, 17 bp, synthetic construct
  source 1..17: mol_type = other DNA
cactcctgggcaggcca

SEQ ID NO: 182179 - DNA, 17 bp, synthetic construct
  source 1..17: mol_type = other DNA
ccactcctgggcaggcc

SEQ ID NO: 182180 - DNA, 17 bp, synthetic construct
  source 1..17: mol_type = other DNA
gccactcctgggcaggc

SEQ ID NO: 182181 - DNA, 17 bp, synthetic construct
  source 1..17: mol_type = other DNA
ggccactcctgggcagg

SEQ ID NO: 182182 - DNA, 17 bp, synthetic construct
  source 1..17: mol_type = other DNA
gggccactcctgggcag

SEQ ID NO: 182183 - DNA, 17 bp, synthetic construct
  source 1..17: mol_type = other DNA
tgggccactcctgggca

SEQ ID NO: 182184 - DNA, 17 bp, synthetic construct
  source 1..17: mol_type = other DNA
ctgggccactcctgggc

SEQ ID NO: 182185 - DNA, 17 bp, synthetic construct
  source 1..17: mol_type = other DNA
cctgggccactcctggg

SEQ ID NO: 182186 - DNA, 17 bp, synthetic construct
  source 1..17: mol_type = other DNA
ccctgggccactcctgg

SEQ ID NO: 182187 - DNA, 17 bp, synthetic construct
  source 1..17: mol_type = other DNA
tccctgggccactcctg

SEQ ID NO: 182188 - DNA, 17 bp, synthetic construct
  source 1..17: mol_type = other DNA
gtccctgggccactcct

SEQ ID NO: 182189 - DNA, 17 bp, synthetic construct
  source 1..17: mol_type = other DNA
cgtccctgggccactcc

SEQ ID NO: 182190 - DNA, 17 bp, synthetic construct
  source 1..17: mol_type = other DNA
acgtccctgggccactc

SEQ ID NO: 182191 - DNA, 17 bp, synthetic construct
  source 1..17: mol_type = other DNA
cacgtccctgggccact

SEQ ID NO: 182192 - DNA, 17 bp, synthetic construct
  source 1..17: mol_type = other DNA
ccacgtccctgggccac

SEQ ID NO: 182193 - DNA, 17 bp, synthetic construct
  source 1..17: mol_type = other DNA
cccacgtccctgggcca

SEQ ID NO: 182194 - DNA, 17 bp, synthetic construct
  source 1..17: mol_type = other DNA
tcccacgtccctgggcc

SEQ ID NO: 182195 - DNA, 17 bp, synthetic construct
  source 1..17: mol_type = other DNA
ttcccacgtccctgggc

SEQ ID NO: 182196 - DNA, 17 bp, synthetic construct
  source 1..17: mol_type = other DNA
cttcccacgtccctggg

SEQ ID NO: 182197 - DNA, 17 bp, synthetic construct
  source 1..17: mol_type = other DNA
gcttcccacgtccctgg

SEQ ID NO: 182198 - DNA, 17 bp, synthetic construct
  source 1..17: mol_type = other DNA
tgcttcccacgtccctg

SEQ ID NO: 182199 - DNA, 17 bp, synthetic construct
  source 1..17: mol_type = other DNA
ctgcttcccacgtccct

SEQ ID NO: 182200 - DNA, 17 bp, synthetic construct
  source 1..17: mol_type = other DNA
gctgcttcccacgtccc

SEQ ID NO: 182201 - DNA, 17 bp, synthetic construct
  source 1..17: mol_type = other DNA
cgctgcttcccacgtcc

SEQ ID NO: 182202 - DNA, 17 bp, synthetic construct
  source 1..17: mol_type = other DNA
ccgctgcttcccacgtc

SEQ ID NO: 182203 - DNA, 17 bp, synthetic construct
  source 1..17: mol_type = other DNA
cccgctgcttcccacgt

SEQ ID NO: 182204 - DNA, 17 bp, synthetic construct
  source 1..17: mol_type = other DNA
ccccgctgcttcccacg

SEQ ID NO: 182205 - DNA, 17 bp, synthetic construct
  source 1..17: mol_type = other DNA
tccccgctgcttcccac

SEQ ID NO: 182206 - DNA, 17 bp, synthetic construct
  source 1..17: mol_type = other DNA
ctccccgctgcttccca

SEQ ID NO: 182207 - DNA, 17 bp, synthetic construct
  source 1..17: mol_type = other DNA
cctccccgctgcttccc

SEQ ID NO: 182208 - DNA, 17 bp, synthetic construct
  source 1..17: mol_type = other DNA
acctccccgctgcttcc

SEQ ID NO: 182209 - DNA, 17 bp, synthetic construct
  source 1..17: mol_type = other DNA
cacctccccgctgcttc

SEQ ID NO: 182210 - DNA, 17 bp, synthetic construct
  source 1..17: mol_type = other DNA
ccacctccccgctgctt

SEQ ID NO: 182211 - DNA, 17 bp, synthetic construct
  source 1..17: mol_type = other DNA
gccacctccccgctgct

SEQ ID NO: 182212 - DNA, 17 bp, synthetic construct
  source 1..17: mol_type = other DNA
ggccacctccccgctgc

SEQ ID NO: 182213 - DNA, 17 bp, synthetic construct
  source 1..17: mol_type = other DNA
tggccacctccccgctg

SEQ ID NO: 182214 - DNA, 17 bp, synthetic construct
  source 1..17: mol_type = other DNA
ttggccacctccccgct

SEQ ID NO: 182215 - DNA, 17 bp, synthetic construct
  source 1..17: mol_type = other DNA
cttggccacctccccgc

SEQ ID NO: 182216 - DNA, 17 bp, synthetic construct
  source 1..17: mol_type = other DNA
gcttggccacctccccg

SEQ ID NO: 182217 - DNA, 17 bp, synthetic construct
  source 1..17: mol_type = other DNA
tgcttggccacctcccc

SEQ ID NO: 182218 - DNA, 17 bp, synthetic construct
  source 1..17: mol_type = other DNA
ttgcttggccacctccc

SEQ ID NO: 182219 - DNA, 17 bp, synthetic construct
  source 1..17: mol_type = other DNA
cttgcttggccacctcc

SEQ ID NO: 182220 - DNA, 17 bp, synthetic construct
  source 1..17: mol_type = other DNA
ccttgcttggccacctc

SEQ ID NO: 182221 - DNA, 17 bp, synthetic construct
  source 1..17: mol_type = other DNA
cccttgcttggccacct

SEQ ID NO: 182222 - DNA, 17 bp, synthetic construct
  source 1..17: mol_type = other DNA
ccccttgcttggccacc

SEQ ID NO: 182223 - DNA, 17 bp, synthetic construct
  source 1..17: mol_type = other DNA
gccccttgcttggccac

SEQ ID NO: 182224 - DNA, 17 bp, synthetic construct
  source 1..17: mol_type = other DNA
ggccccttgcttggcca

SEQ ID NO: 182225 - DNA, 17 bp, synthetic construct
  source 1..17: mol_type = other DNA
aggccccttgcttggcc

SEQ ID NO: 182226 - DNA, 17 bp, synthetic construct
  source 1..17: mol_type = other DNA
caggccccttgcttggc

SEQ ID NO: 182227 - DNA, 17 bp, synthetic construct
  source 1..17: mol_type = other DNA
ccaggccccttgcttgg

SEQ ID NO: 182228 - DNA, 17 bp, synthetic construct
  source 1..17: mol_type = other DNA
tccaggccccttgcttg

SEQ ID NO: 182229 - DNA, 17 bp, synthetic construct
  source 1..17: mol_type = other DNA
ctccaggccccttgctt

SEQ ID NO: 182230 - DNA, 17 bp, synthetic construct
  source 1..17: mol_type = other DNA
cctccaggccccttgct

SEQ ID NO: 182231 - DNA, 17 bp, synthetic construct
  source 1..17: mol_type = other DNA
ccctccaggccccttgc

SEQ ID NO: 182232 - DNA, 17 bp, synthetic construct
  source 1..17: mol_type = other DNA
tccctccaggccccttg

SEQ ID NO: 182233 - DNA, 17 bp, synthetic construct
  source 1..17: mol_type = other DNA
ctccctccaggcccctt

SEQ ID NO: 182234 - DNA, 17 bp, synthetic construct
  source 1..17: mol_type = other DNA
gctccctccaggcccct

SEQ ID NO: 182235 - DNA, 17 bp, synthetic construct
  source 1..17: mol_type = other DNA
ggctccctccaggcccc

SEQ ID NO: 182236 - DNA, 17 bp, synthetic construct
  source 1..17: mol_type = other DNA
gggctccctccaggccc

SEQ ID NO: 182237 - DNA, 17 bp, synthetic construct
  source 1..17: mol_type = other DNA
ggggctccctccaggcc

SEQ ID NO: 182238 - DNA, 17 bp, synthetic construct
  source 1..17: mol_type = other DNA
gggggctccctccaggc

SEQ ID NO: 182239 - DNA, 17 bp, synthetic construct
  source 1..17: mol_type = other DNA
tgggggctccctccagg

SEQ ID NO: 182240 - DNA, 17 bp, synthetic construct
  source 1..17: mol_type = other DNA
ctgggggctccctccag

SEQ ID NO: 182241 - DNA, 17 bp, synthetic construct
  source 1..17: mol_type = other DNA
cctgggggctccctcca

SEQ ID NO: 182242 - DNA, 17 bp, synthetic construct
  source 1..17: mol_type = other DNA
ccctgggggctccctcc

SEQ ID NO: 182243 - DNA, 17 bp, synthetic construct
  source 1..17: mol_type = other DNA
cccctgggggctccctc

SEQ ID NO: 182244 - DNA, 17 bp, synthetic construct
  source 1..17: mol_type = other DNA
gcccctgggggctccct

SEQ ID NO: 182245 - DNA, 17 bp, synthetic construct
  source 1..17: mol_type = other DNA
agcccctgggggctccc

SEQ ID NO: 182246 - DNA, 17 bp, synthetic construct
  source 1..17: mol_type = other DNA
cagcccctgggggctcc

SEQ ID NO: 182247 - DNA, 17 bp, synthetic construct
  source 1..17: mol_type = other DNA
acagcccctgggggctc

SEQ ID NO: 182248 - DNA, 17 bp, synthetic construct
  source 1..17: mol_type = other DNA
cacagcccctgggggct

SEQ ID NO: 182249 - DNA, 17 bp, synthetic construct
  source 1..17: mol_type = other DNA
tcacagcccctgggggc

SEQ ID NO: 182250 - DNA, 17 bp, synthetic construct
  source 1..17: mol_type = other DNA
ttcacagcccctggggg

SEQ ID NO: 182251 - DNA, 17 bp, synthetic construct
  source 1..17: mol_type = other DNA
cttcacagcccctgggg

SEQ ID NO: 182252 - DNA, 17 bp, synthetic construct
  source 1..17: mol_type = other DNA
gcttcacagcccctggg

SEQ ID NO: 182253 - DNA, 17 bp, synthetic construct
  source 1..17: mol_type = other DNA
cgcttcacagcccctgg

SEQ ID NO: 182254 - DNA, 17 bp, synthetic construct
  source 1..17: mol_type = other DNA
ccgcttcacagcccctg

SEQ ID NO: 182255 - DNA, 17 bp, synthetic construct
  source 1..17: mol_type = other DNA
accgcttcacagcccct

SEQ ID NO: 182256 - DNA, 17 bp, synthetic construct
  source 1..17: mol_type = other DNA
gaccgcttcacagcccc

SEQ ID NO: 182257 - DNA, 17 bp, synthetic construct
  source 1..17: mol_type = other DNA
tgaccgcttcacagccc

SEQ ID NO: 182258 - DNA, 17 bp, synthetic construct
  source 1..17: mol_type = other DNA
ctgaccgcttcacagcc

SEQ ID NO: 182259 - DNA, 17 bp, synthetic construct
  source 1..17: mol_type = other DNA
cctgaccgcttcacagc

SEQ ID NO: 182260 - DNA, 17 bp, synthetic construct
  source 1..17: mol_type = other DNA
acctgaccgcttcacag

SEQ ID NO: 182261 - DNA, 17 bp, synthetic construct
  source 1..17: mol_type = other DNA
gacctgaccgcttcaca

SEQ ID NO: 182262 - DNA, 17 bp, synthetic construct
  source 1..17: mol_type = other DNA
ggacctgaccgcttcac

SEQ ID NO: 182263 - DNA, 17 bp, synthetic construct
  source 1..17: mol_type = other DNA
aggacctgaccgcttca

SEQ ID NO: 182264 - DNA, 17 bp, synthetic construct
  source 1..17: mol_type = other DNA
gaggacctgaccgcttc

SEQ ID NO: 182265 - DNA, 17 bp, synthetic construct
  source 1..17: mol_type = other DNA
cgaggacctgaccgctt

SEQ ID NO: 182266 - DNA, 17 bp, synthetic construct
  source 1..17: mol_type = other DNA
ccgaggacctgaccgct

SEQ ID NO: 182267 - DNA, 17 bp, synthetic construct
  source 1..17: mol_type = other DNA
cccgaggacctgaccgc

SEQ ID NO: 182268 - DNA, 17 bp, synthetic construct
  source 1..17: mol_type = other DNA
ccccgaggacctgaccg

SEQ ID NO: 182269 - DNA, 17 bp, synthetic construct
  source 1..17: mol_type = other DNA
tccccgaggacctgacc

SEQ ID NO: 182270 - DNA, 17 bp, synthetic construct
  source 1..17: mol_type = other DNA
ttccccgaggacctgac

SEQ ID NO: 182271 - DNA, 17 bp, synthetic construct
  source 1..17: mol_type = other DNA
tttccccgaggacctga

SEQ ID NO: 182272 - DNA, 17 bp, synthetic construct
  source 1..17: mol_type = other DNA
ttttccccgaggacctg

SEQ ID NO: 182273 - DNA, 17 bp, synthetic construct
  source 1..17: mol_type = other DNA
cttttccccgaggacct

SEQ ID NO: 182274 - DNA, 17 bp, synthetic construct
  source 1..17: mol_type = other DNA
gcttttccccgaggacc

SEQ ID NO: 182275 - DNA, 17 bp, synthetic construct
  source 1..17: mol_type = other DNA
tgcttttccccgaggac

SEQ ID NO: 182276 - DNA, 17 bp, synthetic construct
  source 1..17: mol_type = other DNA
gtgcttttccccgagga

SEQ ID NO: 182277 - DNA, 17 bp, synthetic construct
  source 1..17: mol_type = other DNA
cgtgcttttccccgagg

SEQ ID NO: 182278 - DNA, 17 bp, synthetic construct
  source 1..17: mol_type = other DNA
gcgtgcttttccccgag

SEQ ID NO: 182279 - DNA, 17 bp, synthetic construct
  source 1..17: mol_type = other DNA
ggcgtgcttttccccga

SEQ ID NO: 182280 - DNA, 17 bp, synthetic construct
  source 1..17: mol_type = other DNA
aggcgtgcttttccccg

SEQ ID NO: 182281 - DNA, 17 bp, synthetic construct
  source 1..17: mol_type = other DNA
caggcgtgcttttcccc

SEQ ID NO: 182282 - DNA, 17 bp, synthetic construct
  source 1..17: mol_type = other DNA
gcaggcgtgcttttccc

SEQ ID NO: 182283 - DNA, 17 bp, synthetic construct
  source 1..17: mol_type = other DNA
cgcaggcgtgcttttcc

SEQ ID NO: 182284 - DNA, 17 bp, synthetic construct
  source 1..17: mol_type = other DNA
tcgcaggcgtgcttttc

SEQ ID NO: 182285 - DNA, 17 bp, synthetic construct
  source 1..17: mol_type = other DNA
gtcgcaggcgtgctttt

SEQ ID NO: 182286 - DNA, 17 bp, synthetic construct
  source 1..17: mol_type = other DNA
agtcgcaggcgtgcttt

SEQ ID NO: 182287 - DNA, 17 bp, synthetic construct
  source 1..17: mol_type = other DNA
aagtcgcaggcgtgctt

SEQ ID NO: 182288 - DNA, 17 bp, synthetic construct
  source 1..17: mol_type = other DNA
taagtcgcaggcgtgct

SEQ ID NO: 182289 - DNA, 17 bp, synthetic construct
  source 1..17: mol_type = other DNA
gtaagtcgcaggcgtgc

SEQ ID NO: 182290 - DNA, 17 bp, synthetic construct
  source 1..17: mol_type = other DNA
agtaagtcgcaggcgtg

SEQ ID NO: 182291 - DNA, 17 bp, synthetic construct
  source 1..17: mol_type = other DNA
gagtaagtcgcaggcgt

SEQ ID NO: 182292 - DNA, 17 bp, synthetic construct
  source 1..17: mol_type = other DNA
agagtaagtcgcaggcg

SEQ ID NO: 182293 - DNA, 17 bp, synthetic construct
  source 1..17: mol_type = other DNA
cagagtaagtcgcaggc

SEQ ID NO: 182294 - DNA, 17 bp, synthetic construct
  source 1..17: mol_type = other DNA
ccagagtaagtcgcagg

SEQ ID NO: 182295 - DNA, 17 bp, synthetic construct
  source 1..17: mol_type = other DNA
cccagagtaagtcgcag

SEQ ID NO: 182296 - DNA, 17 bp, synthetic construct
  source 1..17: mol_type = other DNA
tcccagagtaagtcgca

SEQ ID NO: 182297 - DNA, 17 bp, synthetic construct
  source 1..17: mol_type = other DNA
ttcccagagtaagtcgc

SEQ ID NO: 182298 - DNA, 17 bp, synthetic construct
  source 1..17: mol_type = other DNA
gttcccagagtaagtcg

SEQ ID NO: 182299 - DNA, 17 bp, synthetic construct
  source 1..17: mol_type = other DNA
tgttcccagagtaagtc

SEQ ID NO: 182300 - DNA, 17 bp, synthetic construct
  source 1..17: mol_type = other DNA
ttgttcccagagtaagt

SEQ ID NO: 182301 - DNA, 17 bp, synthetic construct
  source 1..17: mol_type = other DNA
cttgttcccagagtaag

SEQ ID NO: 182302 - DNA, 17 bp, synthetic construct
  source 1..17: mol_type = other DNA
acttgttcccagagtaa

SEQ ID NO: 182303 - DNA, 17 bp, synthetic construct
  source 1..17: mol_type = other DNA
cacttgttcccagagta

SEQ ID NO: 182304 - DNA, 17 bp, synthetic construct
  source 1..17: mol_type = other DNA
ccacttgttcccagagt

SEQ ID NO: 182305 - DNA, 17 bp, synthetic construct
  source 1..17: mol_type = other DNA
accacttgttcccagag

SEQ ID NO: 182306 - DNA, 17 bp, synthetic construct
  source 1..17: mol_type = other DNA
gaccacttgttcccaga

SEQ ID NO: 182307 - DNA, 17 bp, synthetic construct
  source 1..17: mol_type = other DNA
cgaccacttgttcccag

SEQ ID NO: 182308 - DNA, 17 bp, synthetic construct
  source 1..17: mol_type = other DNA
ccgaccacttgttccca

SEQ ID NO: 182309 - DNA, 17 bp, synthetic construct
  source 1..17: mol_type = other DNA
cccgaccacttgttccc

SEQ ID NO: 182310 - DNA, 17 bp, synthetic construct
  source 1..17: mol_type = other DNA
tcccgaccacttgttcc

SEQ ID NO: 182311 - DNA, 17 bp, synthetic construct
  source 1..17: mol_type = other DNA
ctcccgaccacttgttc

SEQ ID NO: 182312 - DNA, 17 bp, synthetic construct
  source 1..17: mol_type = other DNA
cctcccgaccacttgtt

SEQ ID NO: 182313 - DNA, 17 bp, synthetic construct
  source 1..17: mol_type = other DNA
tcctcccgaccacttgt

SEQ ID NO: 182314 - DNA, 17 bp, synthetic construct
  source 1..17: mol_type = other DNA
ctcctcccgaccacttg

SEQ ID NO: 182315 - DNA, 17 bp, synthetic construct
  source 1..17: mol_type = other DNA
cctcctcccgaccactt

SEQ ID NO: 182316 - DNA, 17 bp, synthetic construct
  source 1..17: mol_type = other DNA
tcctcctcccgaccact

SEQ ID NO: 182317 - DNA, 17 bp, synthetic construct
  source 1..17: mol_type = other DNA
ctcctcctcccgaccac

SEQ ID NO: 182318 - DNA, 17 bp, synthetic construct
  source 1..17: mol_type = other DNA
actcctcctcccgacca

SEQ ID NO: 182319 - DNA, 17 bp, synthetic construct
  source 1..17: mol_type = other DNA
cactcctcctcccgacc

SEQ ID NO: 182320 - DNA, 17 bp, synthetic construct
  source 1..17: mol_type = other DNA
tcactcctcctcccgac

SEQ ID NO: 182321 - DNA, 17 bp, synthetic construct
  source 1..17: mol_type = other DNA
ctcactcctcctcccga

SEQ ID NO: 182322 - DNA, 17 bp, synthetic construct
  source 1..17: mol_type = other DNA
gctcactcctcctcccg

SEQ ID NO: 182323 - DNA, 17 bp, synthetic construct
  source 1..17: mol_type = other DNA
tgctcactcctcctccc

SEQ ID NO: 182324 - DNA, 17 bp, synthetic construct
  source 1..17: mol_type = other DNA
ctgctcactcctcctcc

SEQ ID NO: 182325 - DNA, 17 bp, synthetic construct
  source 1..17: mol_type = other DNA
gctgctcactcctcctc

SEQ ID NO: 182326 - DNA, 17 bp, synthetic construct
  source 1..17: mol_type = other DNA
cgctgctcactcctcct

SEQ ID NO: 182327 - DNA, 17 bp, synthetic construct
  source 1..17: mol_type = other DNA
gcgctgctcactcctcc

SEQ ID NO: 182328 - DNA, 17 bp, synthetic construct
  source 1..17: mol_type = other DNA
ggcgctgctcactcctc

SEQ ID NO: 182329 - DNA, 17 bp, synthetic construct
  source 1..17: mol_type = other DNA
gggcgctgctcactcct

SEQ ID NO: 182330 - DNA, 17 bp, synthetic construct
  source 1..17: mol_type = other DNA
tgggcgctgctcactcc

SEQ ID NO: 182331 - DNA, 17 bp, synthetic construct
  source 1..17: mol_type = other DNA
ctgggcgctgctcactc

SEQ ID NO: 182332 - DNA, 17 bp, synthetic construct
  source 1..17: mol_type = other DNA
tctgggcgctgctcact

SEQ ID NO: 182333 - DNA, 17 bp, synthetic construct
  source 1..17: mol_type = other DNA
gtctgggcgctgctcac

SEQ ID NO: 182334 - DNA, 17 bp, synthetic construct
  source 1..17: mol_type = other DNA
tgtctgggcgctgctca

SEQ ID NO: 182335 - DNA, 17 bp, synthetic construct
  source 1..17: mol_type = other DNA
ctgtctgggcgctgctc

SEQ ID NO: 182336 - DNA, 17 bp, synthetic construct
  source 1..17: mol_type = other DNA
actgtctgggcgctgct

SEQ ID NO: 182337 - DNA, 17 bp, synthetic construct
  source 1..17: mol_type = other DNA
cactgtctgggcgctgc

SEQ ID NO: 182338 - DNA, 17 bp, synthetic construct
  source 1..17: mol_type = other DNA
ccactgtctgggcgctg

SEQ ID NO: 182339 - DNA, 17 bp, synthetic construct
  source 1..17: mol_type = other DNA
gccactgtctgggcgct

SEQ ID NO: 182340 - DNA, 17 bp, synthetic construct
  source 1..17: mol_type = other DNA
ggccactgtctgggcgc

SEQ ID NO: 182341 - DNA, 17 bp, synthetic construct
  source 1..17: mol_type = other DNA
aggccactgtctgggcg

SEQ ID NO: 182342 - DNA, 17 bp, synthetic construct
  source 1..17: mol_type = other DNA
gaggccactgtctgggc

SEQ ID NO: 182343 - DNA, 17 bp, synthetic construct
  source 1..17: mol_type = other DNA
ggaggccactgtctggg

SEQ ID NO: 182344 - DNA, 17 bp, synthetic construct
  source 1..17: mol_type = other DNA
tggaggccactgtctgg

SEQ ID NO: 182345 - DNA, 17 bp, synthetic construct
  source 1..17: mol_type = other DNA
atggaggccactgtctg

SEQ ID NO: 182346 - DNA, 17 bp, synthetic construct
  source 1..17: mol_type = other DNA
gatggaggccactgtct

SEQ ID NO: 182347 - DNA, 17 bp, synthetic construct
  source 1..17: mol_type = other DNA
ggatggaggccactgtc

SEQ ID NO: 182348 - DNA, 17 bp, synthetic construct
  source 1..17: mol_type = other DNA
aggatggaggccactgt

SEQ ID NO: 182349 - DNA, 17 bp, synthetic construct
  source 1..17: mol_type = other DNA
gaggatggaggccactg

SEQ ID NO: 182350 - DNA, 17 bp, synthetic construct
  source 1..17: mol_type = other DNA
ggaggatggaggccact

SEQ ID NO: 182351 - DNA, 17 bp, synthetic construct
  source 1..17: mol_type = other DNA
gggaggatggaggccac

SEQ ID NO: 182352 - DNA, 17 bp, synthetic construct
  source 1..17: mol_type = other DNA
cgggaggatggaggcca

SEQ ID NO: 182353 - DNA, 17 bp, synthetic construct
  source 1..17: mol_type = other DNA
gcgggaggatggaggcc

SEQ ID NO: 182354 - DNA, 17 bp, synthetic construct
  source 1..17: mol_type = other DNA
tgcgggaggatggaggc

SEQ ID NO: 182355 - DNA, 17 bp, synthetic construct
  source 1..17: mol_type = other DNA
ctgcgggaggatggagg

SEQ ID NO: 182356 - DNA, 17 bp, synthetic construct
  source 1..17: mol_type = other DNA
actgcgggaggatggag

SEQ ID NO: 182357 - DNA, 17 bp, synthetic construct
  source 1..17: mol_type = other DNA
cactgcgggaggatgga

SEQ ID NO: 182358 - DNA, 17 bp, synthetic construct
  source 1..17: mol_type = other DNA
acactgcgggaggatgg

SEQ ID NO: 182359 - DNA, 17 bp, synthetic construct
  source 1..17: mol_type = other DNA
cacactgcgggaggatg

SEQ ID NO: 182360 - DNA, 17 bp, synthetic construct
  source 1..17: mol_type = other DNA
gcacactgcgggaggat

SEQ ID NO: 182361 - DNA, 17 bp, synthetic construct
  source 1..17: mol_type = other DNA
tgcacactgcgggagga

SEQ ID NO: 182362 - DNA, 17 bp, synthetic construct
  source 1..17: mol_type = other DNA
ttgcacactgcgggagg

SEQ ID NO: 182363 - DNA, 17 bp, synthetic construct
  source 1..17: mol_type = other DNA
gttgcacactgcgggag

SEQ ID NO: 182364 - DNA, 17 bp, synthetic construct
  source 1..17: mol_type = other DNA
tgttgcacactgcggga

SEQ ID NO: 182365 - DNA, 17 bp, synthetic construct
  source 1..17: mol_type = other DNA
gtgttgcacactgcggg

SEQ ID NO: 182366 - DNA, 17 bp, synthetic construct
  source 1..17: mol_type = other DNA
tgtgttgcacactgcgg

SEQ ID NO: 182367 - DNA, 17 bp, synthetic construct
  source 1..17: mol_type = other DNA
ttgtgttgcacactgcg

SEQ ID NO: 182368 - DNA, 17 bp, synthetic construct
  source 1..17: mol_type = other DNA
gttgtgttgcacactgc

SEQ ID NO: 182369 - DNA, 17 bp, synthetic construct
  source 1..17: mol_type = other DNA
ggttgtgttgcacactg

SEQ ID NO: 182370 - DNA, 17 bp, synthetic construct
  source 1..17: mol_type = other DNA
tggttgtgttgcacact

SEQ ID NO: 182371 - DNA, 17 bp, synthetic construct
  source 1..17: mol_type = other DNA
gtggttgtgttgcacac

SEQ ID NO: 182372 - DNA, 17 bp, synthetic construct
  source 1..17: mol_type = other DNA
ggtggttgtgttgcaca

SEQ ID NO: 182373 - DNA, 17 bp, synthetic construct
  source 1..17: mol_type = other DNA
aggtggttgtgttgcac

SEQ ID NO: 182374 - DNA, 17 bp, synthetic construct
  source 1..17: mol_type = other DNA
caggtggttgtgttgca

SEQ ID NO: 182375 - DNA, 17 bp, synthetic construct
  source 1..17: mol_type = other DNA
gcaggtggttgtgttgc

SEQ ID NO: 182376 - DNA, 17 bp, synthetic construct
  source 1..17: mol_type = other DNA
ggcaggtggttgtgttg

SEQ ID NO: 182377 - DNA, 17 bp, synthetic construct
  source 1..17: mol_type = other DNA
gggcaggtggttgtgtt

SEQ ID NO: 182378 - DNA, 17 bp, synthetic construct
  source 1..17: mol_type = other DNA
ggggcaggtggttgtgt

SEQ ID NO: 182379 - DNA, 17 bp, synthetic construct
  source 1..17: mol_type = other DNA
gggggcaggtggttgtg

SEQ ID NO: 182380 - DNA, 17 bp, synthetic construct
  source 1..17: mol_type = other DNA
tgggggcaggtggttgt

SEQ ID NO: 182381 - DNA, 17 bp, synthetic construct
  source 1..17: mol_type = other DNA
ctgggggcaggtggttg

SEQ ID NO: 182382 - DNA, 17 bp, synthetic construct
  source 1..17: mol_type = other DNA
tctgggggcaggtggtt

SEQ ID NO: 182383 - DNA, 17 bp, synthetic construct
  source 1..17: mol_type = other DNA
ctctgggggcaggtggt

SEQ ID NO: 182384 - DNA, 17 bp, synthetic construct
  source 1..17: mol_type = other DNA
gctctgggggcaggtgg

SEQ ID NO: 182385 - DNA, 17 bp, synthetic construct
  source 1..17: mol_type = other DNA
ggctctgggggcaggtg

SEQ ID NO: 182386 - DNA, 17 bp, synthetic construct
  source 1..17: mol_type = other DNA
aggctctgggggcaggt

SEQ ID NO: 182387 - DNA, 17 bp, synthetic construct
  source 1..17: mol_type = other DNA
caggctctgggggcagg

SEQ ID NO: 182388 - DNA, 17 bp, synthetic construct
  source 1..17: mol_type = other DNA
gcaggctctgggggcag

SEQ ID NO: 182389 - DNA, 17 bp, synthetic construct
  source 1..17: mol_type = other DNA
ggcaggctctgggggca

SEQ ID NO: 182390 - DNA, 17 bp, synthetic construct
  source 1..17: mol_type = other DNA
aggcaggctctgggggc

SEQ ID NO: 182391 - DNA, 17 bp, synthetic construct
  source 1..17: mol_type = other DNA
caggcaggctctggggg

SEQ ID NO: 182392 - DNA, 17 bp, synthetic construct
  source 1..17: mol_type = other DNA
acaggcaggctctgggg

SEQ ID NO: 182393 - DNA, 17 bp, synthetic construct
  source 1..17: mol_type = other DNA
cacaggcaggctctggg

SEQ ID NO: 182394 - DNA, 17 bp, synthetic construct
  source 1..17: mol_type = other DNA
acacaggcaggctctgg

SEQ ID NO: 182395 - DNA, 17 bp, synthetic construct
  source 1..17: mol_type = other DNA
cacacaggcaggctctg

SEQ ID NO: 182396 - DNA, 17 bp, synthetic construct
  source 1..17: mol_type = other DNA
gcacacaggcaggctct

SEQ ID NO: 182397 - DNA, 17 bp, synthetic construct
  source 1..17: mol_type = other DNA
ggcacacaggcaggctc

SEQ ID NO: 182398 - DNA, 17 bp, synthetic construct
  source 1..17: mol_type = other DNA
gggcacacaggcaggct

SEQ ID NO: 182399 - DNA, 17 bp, synthetic construct
  source 1..17: mol_type = other DNA
cgggcacacaggcaggc

SEQ ID NO: 182400 - DNA, 17 bp, synthetic construct
  source 1..17: mol_type = other DNA
gcgggcacacaggcagg

SEQ ID NO: 182401 - DNA, 17 bp, synthetic construct
  source 1..17: mol_type = other DNA
ggcgggcacacaggcag

SEQ ID NO: 182402 - DNA, 17 bp, synthetic construct
  source 1..17: mol_type = other DNA
tggcgggcacacaggca

SEQ ID NO: 182403 - DNA, 17 bp, synthetic construct
  source 1..17: mol_type = other DNA
ctggcgggcacacaggc

SEQ ID NO: 182404 - DNA, 17 bp, synthetic construct
  source 1..17: mol_type = other DNA
cctggcgggcacacagg

SEQ ID NO: 182405 - DNA, 17 bp, synthetic construct
  source 1..17: mol_type = other DNA
ccctggcgggcacacag

SEQ ID NO: 182406 - DNA, 17 bp, synthetic construct
  source 1..17: mol_type = other DNA
gccctggcgggcacaca

SEQ ID NO: 182407 - DNA, 17 bp, synthetic construct
  source 1..17: mol_type = other DNA
tgccctggcgggcacac

SEQ ID NO: 182408 - DNA, 17 bp, synthetic construct
  source 1..17: mol_type = other DNA
ctgccctggcgggcaca

SEQ ID NO: 182409 - DNA, 17 bp, synthetic construct
  source 1..17: mol_type = other DNA
cctgccctggcgggcac

SEQ ID NO: 182410 - DNA, 17 bp, synthetic construct
  source 1..17: mol_type = other DNA
tcctgccctggcgggca

SEQ ID NO: 182411 - DNA, 17 bp, synthetic construct
  source 1..17: mol_type = other DNA
ctcctgccctggcgggc

SEQ ID NO: 182412 - DNA, 17 bp, synthetic construct
  source 1..17: mol_type = other DNA
actcctgccctggcggg

SEQ ID NO: 182413 - DNA, 17 bp, synthetic construct
  source 1..17: mol_type = other DNA
gactcctgccctggcgg

SEQ ID NO: 182414 - DNA, 17 bp, synthetic construct
  source 1..17: mol_type = other DNA
ggactcctgccctggcg

SEQ ID NO: 182415 - DNA, 17 bp, synthetic construct
  source 1..17: mol_type = other DNA
tggactcctgccctggc

SEQ ID NO: 182416 - DNA, 17 bp, synthetic construct
  source 1..17: mol_type = other DNA
atggactcctgccctgg

SEQ ID NO: 182417 - DNA, 17 bp, synthetic construct
  source 1..17: mol_type = other DNA
gatggactcctgccctg

SEQ ID NO: 182418 - DNA, 17 bp, synthetic construct
  source 1..17: mol_type = other DNA
agatggactcctgccct

SEQ ID NO: 182419 - DNA, 17 bp, synthetic construct
  source 1..17: mol_type = other DNA
cagatggactcctgccc

SEQ ID NO: 182420 - DNA, 17 bp, synthetic construct
  source 1..17: mol_type = other DNA
gcagatggactcctgcc

SEQ ID NO: 182421 - DNA, 17 bp, synthetic construct
  source 1..17: mol_type = other DNA
tgcagatggactcctgc

SEQ ID NO: 182422 - DNA, 17 bp, synthetic construct
  source 1..17: mol_type = other DNA
gtgcagatggactcctg

SEQ ID NO: 182423 - DNA, 17 bp, synthetic construct
  source 1..17: mol_type = other DNA
ggtgcagatggactcct

SEQ ID NO: 182424 - DNA, 17 bp, synthetic construct
  source 1..17: mol_type = other DNA
gggtgcagatggactcc

SEQ ID NO: 182425 - DNA, 17 bp, synthetic construct
  source 1..17: mol_type = other DNA
tgggtgcagatggactc

SEQ ID NO: 182426 - DNA, 17 bp, synthetic construct
  source 1..17: mol_type = other DNA
ctgggtgcagatggact

SEQ ID NO: 182427 - DNA, 17 bp, synthetic construct
  source 1..17: mol_type = other DNA
cctgggtgcagatggac

SEQ ID NO: 182428 - DNA, 17 bp, synthetic construct
  source 1..17: mol_type = other DNA
tcctgggtgcagatgga

SEQ ID NO: 182429 - DNA, 17 bp, synthetic construct
  source 1..17: mol_type = other DNA
ctcctgggtgcagatgg

SEQ ID NO: 182430 - DNA, 17 bp, synthetic construct
  source 1..17: mol_type = other DNA
cctcctgggtgcagatg

SEQ ID NO: 182431 - DNA, 17 bp, synthetic construct
  source 1..17: mol_type = other DNA
tcctcctgggtgcagat

SEQ ID NO: 182432 - DNA, 17 bp, synthetic construct
  source 1..17: mol_type = other DNA
ctcctcctgggtgcaga

SEQ ID NO: 182433 - DNA, 17 bp, synthetic construct
  source 1..17: mol_type = other DNA
cctcctcctgggtgcag

SEQ ID NO: 182434 - DNA, 17 bp, synthetic construct
  source 1..17: mol_type = other DNA
ccctcctcctgggtgca

SEQ ID NO: 182435 - DNA, 17 bp, synthetic construct
  source 1..17: mol_type = other DNA
gccctcctcctgggtgc

SEQ ID NO: 182436 - DNA, 17 bp, synthetic construct
  source 1..17: mol_type = other DNA
cgccctcctcctgggtg

SEQ ID NO: 182437 - DNA, 17 bp, synthetic construct
  source 1..17: mol_type = other DNA
tcgccctcctcctgggt

SEQ ID NO: 182438 - DNA, 17 bp, synthetic construct
  source 1..17: mol_type = other DNA
gtcgccctcctcctggg

SEQ ID NO: 182439 - DNA, 17 bp, synthetic construct
  source 1..17: mol_type = other DNA
agtcgccctcctcctgg

SEQ ID NO: 182440 - DNA, 17 bp, synthetic construct
  source 1..17: mol_type = other DNA
cagtcgccctcctcctg

SEQ ID NO: 182441 - DNA, 17 bp, synthetic construct
  source 1..17: mol_type = other DNA
gcagtcgccctcctcct

SEQ ID NO: 182442 - DNA, 17 bp, synthetic construct
  source 1..17: mol_type = other DNA
agcagtcgccctcctcc

SEQ ID NO: 182443 - DNA, 17 bp, synthetic construct
  source 1..17: mol_type = other DNA
cagcagtcgccctcctc

SEQ ID NO: 182444 - DNA, 17 bp, synthetic construct
  source 1..17: mol_type = other DNA
acagcagtcgccctcct

SEQ ID NO: 182445 - DNA, 17 bp, synthetic construct
  source 1..17: mol_type = other DNA
gacagcagtcgccctcc

SEQ ID NO: 182446 - DNA, 17 bp, synthetic construct
  source 1..17: mol_type = other DNA
ggacagcagtcgccctc

SEQ ID NO: 182447 - DNA, 17 bp, synthetic construct
  source 1..17: mol_type = other DNA
gggacagcagtcgccct

SEQ ID NO: 182448 - DNA, 17 bp, synthetic construct
  source 1..17: mol_type = other DNA
tgggacagcagtcgccc

SEQ ID NO: 182449 - DNA, 17 bp, synthetic construct
  source 1..17: mol_type = other DNA
gtgggacagcagtcgcc

SEQ ID NO: 182450 - DNA, 17 bp, synthetic construct
  source 1..17: mol_type = other DNA
ggtgggacagcagtcgc

SEQ ID NO: 182451 - DNA, 17 bp, synthetic construct
  source 1..17: mol_type = other DNA
aggtgggacagcagtcg

SEQ ID NO: 182452 - DNA, 17 bp, synthetic construct
  source 1..17: mol_type = other DNA
aaggtgggacagcagtc

SEQ ID NO: 182453 - DNA, 17 bp, synthetic construct
  source 1..17: mol_type = other DNA
gaaggtgggacagcagt

SEQ ID NO: 182454 - DNA, 17 bp, synthetic construct
  source 1..17: mol_type = other DNA
ggaaggtgggacagcag

SEQ ID NO: 182455 - DNA, 17 bp, synthetic construct
  source 1..17: mol_type = other DNA
cggaaggtgggacagca

SEQ ID NO: 182456 - DNA, 17 bp, synthetic construct
  source 1..17: mol_type = other DNA
gcggaaggtgggacagc

SEQ ID NO: 182457 - DNA, 17 bp, synthetic construct
  source 1..17: mol_type = other DNA
agcggaaggtgggacag

SEQ ID NO: 182458 - DNA, 17 bp, synthetic construct
  source 1..17: mol_type = other DNA
cagcggaaggtgggaca

SEQ ID NO: 182459 - DNA, 17 bp, synthetic construct
  source 1..17: mol_type = other DNA
gcagcggaaggtgggac

SEQ ID NO: 182460 - DNA, 17 bp, synthetic construct
  source 1..17: mol_type = other DNA
tgcagcggaaggtggga

SEQ ID NO: 182461 - DNA, 17 bp, synthetic construct
  source 1..17: mol_type = other DNA
ctgcagcggaaggtggg

SEQ ID NO: 182462 - DNA, 17 bp, synthetic construct
  source 1..17: mol_type = other DNA
actgcagcggaaggtgg

SEQ ID NO: 182463 - DNA, 17 bp, synthetic construct
  source 1..17: mol_type = other DNA
cactgcagcggaaggtg

SEQ ID NO: 182464 - DNA, 17 bp, synthetic construct
  source 1..17: mol_type = other DNA
tcactgcagcggaaggt

SEQ ID NO: 182465 - DNA, 17 bp, synthetic construct
  source 1..17: mol_type = other DNA
ctcactgcagcggaagg

SEQ ID NO: 182466 - DNA, 17 bp, synthetic construct
  source 1..17: mol_type = other DNA
gctcactgcagcggaag

SEQ ID NO: 182467 - DNA, 17 bp, synthetic construct
  source 1..17: mol_type = other DNA
cgctcactgcagcggaa

SEQ ID NO: 182468 - DNA, 17 bp, synthetic construct
  source 1..17: mol_type = other DNA
ccgctcactgcagcgga

SEQ ID NO: 182469 - DNA, 17 bp, synthetic construct
  source 1..17: mol_type = other DNA
cccgctcactgcagcgg

SEQ ID NO: 182470 - DNA, 17 bp, synthetic construct
  source 1..17: mol_type = other DNA
ccccgctcactgcagcg

SEQ ID NO: 182471 - DNA, 17 bp, synthetic construct
  source 1..17: mol_type = other DNA
gccccgctcactgcagc

SEQ ID NO: 182472 - DNA, 17 bp, synthetic construct
  source 1..17: mol_type = other DNA
agccccgctcactgcag

SEQ ID NO: 182473 - DNA, 17 bp, synthetic construct
  source 1..17: mol_type = other DNA
cagccccgctcactgca

SEQ ID NO: 182474 - DNA, 17 bp, synthetic construct
  source 1..17: mol_type = other DNA
ccagccccgctcactgc

SEQ ID NO: 182475 - DNA, 17 bp, synthetic construct
  source 1..17: mol_type = other DNA
cccagccccgctcactg

SEQ ID NO: 182476 - DNA, 17 bp, synthetic construct
  source 1..17: mol_type = other DNA
ccccagccccgctcact

SEQ ID NO: 182477 - DNA, 17 bp, synthetic construct
  source 1..17: mol_type = other DNA
gccccagccccgctcac

SEQ ID NO: 182478 - DNA, 17 bp, synthetic construct
  source 1..17: mol_type = other DNA
ggccccagccccgctca

SEQ ID NO: 182479 - DNA, 17 bp, synthetic construct
  source 1..17: mol_type = other DNA
cggccccagccccgctc

SEQ ID NO: 182480 - DNA, 17 bp, synthetic construct
  source 1..17: mol_type = other DNA
ccggccccagccccgct

SEQ ID NO: 182481 - DNA, 17 bp, synthetic construct
  source 1..17: mol_type = other DNA
cccggccccagccccgc

SEQ ID NO: 182482 - DNA, 17 bp, synthetic construct
  source 1..17: mol_type = other DNA
gcccggccccagccccg

SEQ ID NO: 182483 - DNA, 17 bp, synthetic construct
  source 1..17: mol_type = other DNA
agcccggccccagcccc

SEQ ID NO: 182484 - DNA, 17 bp, synthetic construct
  source 1..17: mol_type = other DNA
gagcccggccccagccc

SEQ ID NO: 182485 - DNA, 17 bp, synthetic construct
  source 1..17: mol_type = other DNA
ggagcccggccccagcc

SEQ ID NO: 182486 - DNA, 17 bp, synthetic construct
  source 1..17: mol_type = other DNA
aggagcccggccccagc

SEQ ID NO: 182487 - DNA, 17 bp, synthetic construct
  source 1..17: mol_type = other DNA
caggagcccggccccag

SEQ ID NO: 182488 - DNA, 17 bp, synthetic construct
  source 1..17: mol_type = other DNA
ccaggagcccggcccca

SEQ ID NO: 182489 - DNA, 17 bp, synthetic construct
  source 1..17: mol_type = other DNA
cccaggagcccggcccc

SEQ ID NO: 182490 - DNA, 17 bp, synthetic construct
  source 1..17: mol_type = other DNA
acccaggagcccggccc

SEQ ID NO: 182491 - DNA, 17 bp, synthetic construct
  source 1..17: mol_type = other DNA
cacccaggagcccggcc

SEQ ID NO: 182492 - DNA, 17 bp, synthetic construct
  source 1..17: mol_type = other DNA
ccacccaggagcccggc

SEQ ID NO: 182493 - DNA, 17 bp, synthetic construct
  source 1..17: mol_type = other DNA
gccacccaggagcccgg

SEQ ID NO: 182494 - DNA, 17 bp, synthetic construct
  source 1..17: mol_type = other DNA
ggccacccaggagcccg

SEQ ID NO: 182495 - DNA, 17 bp, synthetic construct
  source 1..17: mol_type = other DNA
aggccacccaggagccc

SEQ ID NO: 182496 - DNA, 17 bp, synthetic construct
  source 1..17: mol_type = other DNA
gaggccacccaggagcc

SEQ ID NO: 182497 - DNA, 17 bp, synthetic construct
  source 1..17: mol_type = other DNA
agaggccacccaggagc

SEQ ID NO: 182498 - DNA, 17 bp, synthetic construct
  source 1..17: mol_type = other DNA
aagaggccacccaggag

SEQ ID NO: 182499 - DNA, 17 bp, synthetic construct
  source 1..17: mol_type = other DNA
caagaggccacccagga

SEQ ID NO: 182500 - DNA, 17 bp, synthetic construct
  source 1..17: mol_type = other DNA
gcaagaggccacccagg

SEQ ID NO: 182501 - DNA, 17 bp, synthetic construct
  source 1..17: mol_type = other DNA
agcaagaggccacccag

SEQ ID NO: 182502 - DNA, 17 bp, synthetic construct
  source 1..17: mol_type = other DNA
cagcaagaggccaccca

SEQ ID NO: 182503 - DNA, 17 bp, synthetic construct
  source 1..17: mol_type = other DNA
ccagcaagaggccaccc

SEQ ID NO: 182504 - DNA, 17 bp, synthetic construct
  source 1..17: mol_type = other DNA
cccagcaagaggccacc

SEQ ID NO: 182505 - DNA, 17 bp, synthetic construct
  source 1..17: mol_type = other DNA
ccccagcaagaggccac

SEQ ID NO: 182506 - DNA, 17 bp, synthetic construct
  source 1..17: mol_type = other DNA
cccccagcaagaggcca

SEQ ID NO: 182507 - DNA, 17 bp, synthetic construct
  source 1..17: mol_type = other DNA
acccccagcaagaggcc

SEQ ID NO: 182508 - DNA, 17 bp, synthetic construct
  source 1..17: mol_type = other DNA
cacccccagcaagaggc

SEQ ID NO: 182509 - DNA, 17 bp, synthetic construct
  source 1..17: mol_type = other DNA
ccacccccagcaagagg

SEQ ID NO: 182510 - DNA, 17 bp, synthetic construct
  source 1..17: mol_type = other DNA
cccacccccagcaagag

SEQ ID NO: 182511 - DNA, 17 bp, synthetic construct
  source 1..17: mol_type = other DNA
ccccacccccagcaaga

SEQ ID NO: 182512 - DNA, 17 bp, synthetic construct
  source 1..17: mol_type = other DNA
cccccacccccagcaag

SEQ ID NO: 182513 - DNA, 17 bp, synthetic construct
  source 1..17: mol_type = other DNA
tcccccacccccagcaa

SEQ ID NO: 182514 - DNA, 17 bp, synthetic construct
  source 1..17: mol_type = other DNA
ctcccccacccccagca

SEQ ID NO: 182515 - DNA, 17 bp, synthetic construct
  source 1..17: mol_type = other DNA
actcccccacccccagc

SEQ ID NO: 182516 - DNA, 17 bp, synthetic construct
  source 1..17: mol_type = other DNA
cactcccccacccccag

SEQ ID NO: 182517 - DNA, 17 bp, synthetic construct
  source 1..17: mol_type = other DNA
gcactcccccaccccca

SEQ ID NO: 182518 - DNA, 17 bp, synthetic construct
  source 1..17: mol_type = other DNA
tgcactcccccaccccc

SEQ ID NO: 182519 - DNA, 17 bp, synthetic construct
  source 1..17: mol_type = other DNA
ctgcactcccccacccc

SEQ ID NO: 182520 - DNA, 17 bp, synthetic construct
  source 1..17: mol_type = other DNA
cctgcactcccccaccc

SEQ ID NO: 182521 - DNA, 17 bp, synthetic construct
  source 1..17: mol_type = other DNA
tcctgcactcccccacc

SEQ ID NO: 182522 - DNA, 17 bp, synthetic construct
  source 1..17: mol_type = other DNA
atcctgcactcccccac

SEQ ID NO: 182523 - DNA, 17 bp, synthetic construct
  source 1..17: mol_type = other DNA
catcctgcactccccca

SEQ ID NO: 182524 - DNA, 17 bp, synthetic construct
  source 1..17: mol_type = other DNA
ccatcctgcactccccc

SEQ ID NO: 182525 - DNA, 17 bp, synthetic construct
  source 1..17: mol_type = other DNA
accatcctgcactcccc

SEQ ID NO: 182526 - DNA, 17 bp, synthetic construct
  source 1..17: mol_type = other DNA
caccatcctgcactccc

SEQ ID NO: 182527 - DNA, 17 bp, synthetic construct
  source 1..17: mol_type = other DNA
ccaccatcctgcactcc

SEQ ID NO: 182528 - DNA, 17 bp, synthetic construct
  source 1..17: mol_type = other DNA
cccaccatcctgcactc

SEQ ID NO: 182529 - DNA, 17 bp, synthetic construct
  source 1..17: mol_type = other DNA
ccccaccatcctgcact

SEQ ID NO: 182530 - DNA, 17 bp, synthetic construct
  source 1..17: mol_type = other DNA
cccccaccatcctgcac

SEQ ID NO: 182531 - DNA, 17 bp, synthetic construct
  source 1..17: mol_type = other DNA
gcccccaccatcctgca

SEQ ID NO: 182532 - DNA, 17 bp, synthetic construct
  source 1..17: mol_type = other DNA
cgcccccaccatcctgc

SEQ ID NO: 182533 - DNA, 17 bp, synthetic construct
  source 1..17: mol_type = other DNA
gcgcccccaccatcctg

SEQ ID NO: 182534 - DNA, 17 bp, synthetic construct
  source 1..17: mol_type = other DNA
agcgcccccaccatcct

SEQ ID NO: 182535 - DNA, 17 bp, synthetic construct
  source 1..17: mol_type = other DNA
cagcgcccccaccatcc

SEQ ID NO: 182536 - DNA, 17 bp, synthetic construct
  source 1..17: mol_type = other DNA
ccagcgcccccaccatc

SEQ ID NO: 182537 - DNA, 17 bp, synthetic construct
  source 1..17: mol_type = other DNA
tccagcgcccccaccat

SEQ ID NO: 182538 - DNA, 17 bp, synthetic construct
  source 1..17: mol_type = other DNA
ctccagcgcccccacca

SEQ ID NO: 182539 - DNA, 17 bp, synthetic construct
  source 1..17: mol_type = other DNA
gctccagcgcccccacc

SEQ ID NO: 182540 - DNA, 17 bp, synthetic construct
  source 1..17: mol_type = other DNA
tgctccagcgcccccac

SEQ ID NO: 182541 - DNA, 17 bp, synthetic construct
  source 1..17: mol_type = other DNA
gtgctccagcgccccca

SEQ ID NO: 182542 - DNA, 17 bp, synthetic construct
  source 1..17: mol_type = other DNA
tgtgctccagcgccccc

SEQ ID NO: 182543 - DNA, 17 bp, synthetic construct
  source 1..17: mol_type = other DNA
atgtgctccagcgcccc

SEQ ID NO: 182544 - DNA, 17 bp, synthetic construct
  source 1..17: mol_type = other DNA
catgtgctccagcgccc

SEQ ID NO: 182545 - DNA, 17 bp, synthetic construct
  source 1..17: mol_type = other DNA
gcatgtgctccagcgcc

SEQ ID NO: 182546 - DNA, 17 bp, synthetic construct
  source 1..17: mol_type = other DNA
agcatgtgctccagcgc

SEQ ID NO: 182547 - DNA, 17 bp, synthetic construct
  source 1..17: mol_type = other DNA
gagcatgtgctccagcg

SEQ ID NO: 182548 - DNA, 17 bp, synthetic construct
  source 1..17: mol_type = other DNA
ggagcatgtgctccagc

SEQ ID NO: 182549 - DNA, 17 bp, synthetic construct
  source 1..17: mol_type = other DNA
gggagcatgtgctccag

SEQ ID NO: 182550 - DNA, 17 bp, synthetic construct
  source 1..17: mol_type = other DNA
ggggagcatgtgctcca

SEQ ID NO: 182551 - DNA, 17 bp, synthetic construct
  source 1..17: mol_type = other DNA
tggggagcatgtgctcc

SEQ ID NO: 182552 - DNA, 17 bp, synthetic construct
  source 1..17: mol_type = other DNA
gtggggagcatgtgctc

SEQ ID NO: 182553 - DNA, 17 bp, synthetic construct
  source 1..17: mol_type = other DNA
ggtggggagcatgtgct

SEQ ID NO: 182554 - DNA, 17 bp, synthetic construct
  source 1..17: mol_type = other DNA
tggtggggagcatgtgc

SEQ ID NO: 182555 - DNA, 17 bp, synthetic construct
  source 1..17: mol_type = other DNA
gtggtggggagcatgtg

SEQ ID NO: 182556 - DNA, 17 bp, synthetic construct
  source 1..17: mol_type = other DNA
agtggtggggagcatgt

SEQ ID NO: 182557 - DNA, 17 bp, synthetic construct
  source 1..17: mol_type = other DNA
aagtggtggggagcatg

SEQ ID NO: 182558 - DNA, 17 bp, synthetic construct
  source 1..17: mol_type = other DNA
caagtggtggggagcat

SEQ ID NO: 182559 - DNA, 17 bp, synthetic construct
  source 1..17: mol_type = other DNA
acaagtggtggggagca

SEQ ID NO: 182560 - DNA, 17 bp, synthetic construct
  source 1..17: mol_type = other DNA
gacaagtggtggggagc

SEQ ID NO: 182561 - DNA, 17 bp, synthetic construct
  source 1..17: mol_type = other DNA
cgacaagtggtggggag

SEQ ID NO: 182562 - DNA, 17 bp, synthetic construct
  source 1..17: mol_type = other DNA
tcgacaagtggtgggga

SEQ ID NO: 182563 - DNA, 17 bp, synthetic construct
  source 1..17: mol_type = other DNA
ctcgacaagtggtgggg

SEQ ID NO: 182564 - DNA, 17 bp, synthetic construct
  source 1..17: mol_type = other DNA
cctcgacaagtggtggg

SEQ ID NO: 182565 - DNA, 17 bp, synthetic construct
  source 1..17: mol_type = other DNA
ccctcgacaagtggtgg

SEQ ID NO: 182566 - DNA, 17 bp, synthetic construct
  source 1..17: mol_type = other DNA
gccctcgacaagtggtg

SEQ ID NO: 182567 - DNA, 17 bp, synthetic construct
  source 1..17: mol_type = other DNA
agccctcgacaagtggt

SEQ ID NO: 182568 - DNA, 17 bp, synthetic construct
  source 1..17: mol_type = other DNA
aagccctcgacaagtgg

SEQ ID NO: 182569 - DNA, 17 bp, synthetic construct
  source 1..17: mol_type = other DNA
taagccctcgacaagtg

SEQ ID NO: 182570 - DNA, 17 bp, synthetic construct
  source 1..17: mol_type = other DNA
ctaagccctcgacaagt

SEQ ID NO: 182571 - DNA, 17 bp, synthetic construct
  source 1..17: mol_type = other DNA
gctaagccctcgacaag

SEQ ID NO: 182572 - DNA, 17 bp, synthetic construct
  source 1..17: mol_type = other DNA
agctaagccctcgacaa

SEQ ID NO: 182573 - DNA, 17 bp, synthetic construct
  source 1..17: mol_type = other DNA
gagctaagccctcgaca

SEQ ID NO: 182574 - DNA, 17 bp, synthetic construct
  source 1..17: mol_type = other DNA
ggagctaagccctcgac

SEQ ID NO: 182575 - DNA, 17 bp, synthetic construct
  source 1..17: mol_type = other DNA
gggagctaagccctcga

SEQ ID NO: 182576 - DNA, 17 bp, synthetic construct
  source 1..17: mol_type = other DNA
agggagctaagccctcg

SEQ ID NO: 182577 - DNA, 17 bp, synthetic construct
  source 1..17: mol_type = other DNA
aagggagctaagccctc

SEQ ID NO: 182578 - DNA, 17 bp, synthetic construct
  source 1..17: mol_type = other DNA
aaagggagctaagccct

SEQ ID NO: 182579 - DNA, 17 bp, synthetic construct
  source 1..17: mol_type = other DNA
gaaagggagctaagccc

SEQ ID NO: 182580 - DNA, 17 bp, synthetic construct
  source 1..17: mol_type = other DNA
ggaaagggagctaagcc

SEQ ID NO: 182581 - DNA, 17 bp, synthetic construct
  source 1..17: mol_type = other DNA
aggaaagggagctaagc

SEQ ID NO: 182582 - DNA, 17 bp, synthetic construct
  source 1..17: mol_type = other DNA
aaggaaagggagctaag

SEQ ID NO: 182583 - DNA, 17 bp, synthetic construct
  source 1..17: mol_type = other DNA
gaaggaaagggagctaa

SEQ ID NO: 182584 - DNA, 17 bp, synthetic construct
  source 1..17: mol_type = other DNA
ggaaggaaagggagcta

SEQ ID NO: 182585 - DNA, 17 bp, synthetic construct
  source 1..17: mol_type = other DNA
tggaaggaaagggagct

SEQ ID NO: 182586 - DNA, 17 bp, synthetic construct
  source 1..17: mol_type = other DNA
ctggaaggaaagggagc

SEQ ID NO: 182587 - DNA, 17 bp, synthetic construct
  source 1..17: mol_type = other DNA
cctggaaggaaagggag

SEQ ID NO: 182588 - DNA, 17 bp, synthetic construct
  source 1..17: mol_type = other DNA
tcctggaaggaaaggga

SEQ ID NO: 182589 - DNA, 17 bp, synthetic construct
  source 1..17: mol_type = other DNA
gtcctggaaggaaaggg

SEQ ID NO: 182590 - DNA, 17 bp, synthetic construct
  source 1..17: mol_type = other DNA
ggtcctggaaggaaagg

SEQ ID NO: 182591 - DNA, 17 bp, synthetic construct
  source 1..17: mol_type = other DNA
aggtcctggaaggaaag

SEQ ID NO: 182592 - DNA, 17 bp, synthetic construct
  source 1..17: mol_type = other DNA
gaggtcctggaaggaaa

SEQ ID NO: 182593 - DNA, 17 bp, synthetic construct
  source 1..17: mol_type = other DNA
tgaggtcctggaaggaa

SEQ ID NO: 182594 - DNA, 17 bp, synthetic construct
  source 1..17: mol_type = other DNA
ctgaggtcctggaagga

SEQ ID NO: 182595 - DNA, 17 bp, synthetic construct
  source 1..17: mol_type = other DNA
gctgaggtcctggaagg

SEQ ID NO: 182596 - DNA, 17 bp, synthetic construct
  source 1..17: mol_type = other DNA
agctgaggtcctggaag

SEQ ID NO: 182597 - DNA, 17 bp, synthetic construct
  source 1..17: mol_type = other DNA
cagctgaggtcctggaa

SEQ ID NO: 182598 - DNA, 17 bp, synthetic construct
  source 1..17: mol_type = other DNA
acagctgaggtcctgga

SEQ ID NO: 182599 - DNA, 17 bp, synthetic construct
  source 1..17: mol_type = other DNA
cacagctgaggtcctgg

SEQ ID NO: 182600 - DNA, 17 bp, synthetic construct
  source 1..17: mol_type = other DNA
acacagctgaggtcctg

SEQ ID NO: 182601 - DNA, 17 bp, synthetic construct
  source 1..17: mol_type = other DNA
aacacagctgaggtcct

SEQ ID NO: 182602 - DNA, 17 bp, synthetic construct
  source 1..17: mol_type = other DNA
gaacacagctgaggtcc

SEQ ID NO: 182603 - DNA, 17 bp, synthetic construct
  source 1..17: mol_type = other DNA
cgaacacagctgaggtc

SEQ ID NO: 182604 - DNA, 17 bp, synthetic construct
  source 1..17: mol_type = other DNA
acgaacacagctgaggt

SEQ ID NO: 182605 - DNA, 17 bp, synthetic construct
  source 1..17: mol_type = other DNA
tacgaacacagctgagg

SEQ ID NO: 182606 - DNA, 17 bp, synthetic construct
  source 1..17: mol_type = other DNA
gtacgaacacagctgag

SEQ ID NO: 182607 - DNA, 17 bp, synthetic construct
  source 1..17: mol_type = other DNA
tgtacgaacacagctga

SEQ ID NO: 182608 - DNA, 17 bp, synthetic construct
  source 1..17: mol_type = other DNA
ttgtacgaacacagctg

SEQ ID NO: 182609 - DNA, 17 bp, synthetic construct
  source 1..17: mol_type = other DNA
attgtacgaacacagct

SEQ ID NO: 182610 - DNA, 17 bp, synthetic construct
  source 1..17: mol_type = other DNA
cattgtacgaacacagc

SEQ ID NO: 182611 - DNA, 17 bp, synthetic construct
  source 1..17: mol_type = other DNA
ccattgtacgaacacag

SEQ ID NO: 182612 - DNA, 17 bp, synthetic construct
  source 1..17: mol_type = other DNA
gccattgtacgaacaca

SEQ ID NO: 182613 - DNA, 17 bp, synthetic construct
  source 1..17: mol_type = other DNA
tgccattgtacgaacac

SEQ ID NO: 182614 - DNA, 17 bp, synthetic construct
  source 1..17: mol_type = other DNA
gtgccattgtacgaaca

SEQ ID NO: 182615 - DNA, 17 bp, synthetic construct
  source 1..17: mol_type = other DNA
ggtgccattgtacgaac

SEQ ID NO: 182616 - DNA, 17 bp, synthetic construct
  source 1..17: mol_type = other DNA
aggtgccattgtacgaa

SEQ ID NO: 182617 - DNA, 17 bp, synthetic construct
  source 1..17: mol_type = other DNA
aaggtgccattgtacga

SEQ ID NO: 182618 - DNA, 17 bp, synthetic construct
  source 1..17: mol_type = other DNA
gaaggtgccattgtacg

SEQ ID NO: 182619 - DNA, 17 bp, synthetic construct
  source 1..17: mol_type = other DNA
agaaggtgccattgtac

SEQ ID NO: 182620 - DNA, 17 bp, synthetic construct
  source 1..17: mol_type = other DNA
tagaaggtgccattgta

SEQ ID NO: 182621 - DNA, 17 bp, synthetic construct
  source 1..17: mol_type = other DNA
gtagaaggtgccattgt

SEQ ID NO: 182622 - DNA, 17 bp, synthetic construct
  source 1..17: mol_type = other DNA
cgtagaaggtgccattg

SEQ ID NO: 182623 - DNA, 17 bp, synthetic construct
  source 1..17: mol_type = other DNA
ccgtagaaggtgccatt

SEQ ID NO: 182624 - DNA, 17 bp, synthetic construct
  source 1..17: mol_type = other DNA
cccgtagaaggtgccat

SEQ ID NO: 182625 - DNA, 17 bp, synthetic construct
  source 1..17: mol_type = other DNA
ccccgtagaaggtgcca

SEQ ID NO: 182626 - DNA, 17 bp, synthetic construct
  source 1..17: mol_type = other DNA
accccgtagaaggtgcc

SEQ ID NO: 182627 - DNA, 17 bp, synthetic construct
  source 1..17: mol_type = other DNA
taccccgtagaaggtgc

SEQ ID NO: 182628 - DNA, 17 bp, synthetic construct
  source 1..17: mol_type = other DNA
ttaccccgtagaaggtg

SEQ ID NO: 182629 - DNA, 17 bp, synthetic construct
  source 1..17: mol_type = other DNA
cttaccccgtagaaggt

SEQ ID NO: 182630 - DNA, 17 bp, synthetic construct
  source 1..17: mol_type = other DNA
ccttaccccgtagaagg

SEQ ID NO: 182631 - DNA, 17 bp, synthetic construct
  source 1..17: mol_type = other DNA
cccttaccccgtagaag

SEQ ID NO: 182632 - DNA, 17 bp, synthetic construct
  source 1..17: mol_type = other DNA
gcccttaccccgtagaa

SEQ ID NO: 182633 - DNA, 17 bp, synthetic construct
  source 1..17: mol_type = other DNA
tgcccttaccccgtaga

SEQ ID NO: 182634 - DNA, 17 bp, synthetic construct
  source 1..17: mol_type = other DNA
gtgcccttaccccgtag

SEQ ID NO: 182635 - DNA, 17 bp, synthetic construct
  source 1..17: mol_type = other DNA
tgtgcccttaccccgta

SEQ ID NO: 182636 - DNA, 17 bp, synthetic construct
  source 1..17: mol_type = other DNA
ctgtgcccttaccccgt

SEQ ID NO: 182637 - DNA, 17 bp, synthetic construct
  source 1..17: mol_type = other DNA
gctgtgcccttaccccg

SEQ ID NO: 182638 - DNA, 17 bp, synthetic construct
  source 1..17: mol_type = other DNA
tgctgtgcccttacccc

SEQ ID NO: 182639 - DNA, 17 bp, synthetic construct
  source 1..17: mol_type = other DNA
ctgctgtgcccttaccc

SEQ ID NO: 182640 - DNA, 17 bp, synthetic construct
  source 1..17: mol_type = other DNA
actgctgtgcccttacc

SEQ ID NO: 182641 - DNA, 17 bp, synthetic construct
  source 1..17: mol_type = other DNA
cactgctgtgcccttac

SEQ ID NO: 182642 - DNA, 17 bp, synthetic construct
  source 1..17: mol_type = other DNA
ccactgctgtgccctta

SEQ ID NO: 182643 - DNA, 17 bp, synthetic construct
  source 1..17: mol_type = other DNA
cccactgctgtgccctt

SEQ ID NO: 182644 - DNA, 17 bp, synthetic construct
  source 1..17: mol_type = other DNA
acccactgctgtgccct

SEQ ID NO: 182645 - DNA, 17 bp, synthetic construct
  source 1..17: mol_type = other DNA
cacccactgctgtgccc

SEQ ID NO: 182646 - DNA, 17 bp, synthetic construct
  source 1..17: mol_type = other DNA
ccacccactgctgtgcc

SEQ ID NO: 182647 - DNA, 17 bp, synthetic construct
  source 1..17: mol_type = other DNA
cccacccactgctgtgc

SEQ ID NO: 182648 - DNA, 17 bp, synthetic construct
  source 1..17: mol_type = other DNA
acccacccactgctgtg

SEQ ID NO: 182649 - DNA, 17 bp, synthetic construct
  source 1..17: mol_type = other DNA
cacccacccactgctgt

SEQ ID NO: 182650 - DNA, 17 bp, synthetic construct
  source 1..17: mol_type = other DNA
acacccacccactgctg

SEQ ID NO: 182651 - DNA, 17 bp, synthetic construct
  source 1..17: mol_type = other DNA
cacacccacccactgct

SEQ ID NO: 182652 - DNA, 17 bp, synthetic construct
  source 1..17: mol_type = other DNA
ccacacccacccactgc

SEQ ID NO: 182653 - DNA, 17 bp, synthetic construct
  source 1..17: mol_type = other DNA
gccacacccacccactg

SEQ ID NO: 182654 - DNA, 17 bp, synthetic construct
  source 1..17: mol_type = other DNA
ggccacacccacccact

SEQ ID NO: 182655 - DNA, 17 bp, synthetic construct
  source 1..17: mol_type = other DNA
gggccacacccacccac

SEQ ID NO: 182656 - DNA, 17 bp, synthetic construct
  source 1..17: mol_type = other DNA
agggccacacccaccca

SEQ ID NO: 182657 - DNA, 17 bp, synthetic construct
  source 1..17: mol_type = other DNA
cagggccacacccaccc

SEQ ID NO: 182658 - DNA, 17 bp, synthetic construct
  source 1..17: mol_type = other DNA
ccagggccacacccacc

SEQ ID NO: 182659 - DNA, 17 bp, synthetic construct
  source 1..17: mol_type = other DNA
cccagggccacacccac

SEQ ID NO: 182660 - DNA, 17 bp, synthetic construct
  source 1..17: mol_type = other DNA
ccccagggccacaccca

SEQ ID NO: 182661 - DNA, 17 bp, synthetic construct
  source 1..17: mol_type = other DNA
gccccagggccacaccc

SEQ ID NO: 182662 - DNA, 17 bp, synthetic construct
  source 1..17: mol_type = other DNA
ggccccagggccacacc

SEQ ID NO: 182663 - DNA, 17 bp, synthetic construct
  source 1..17: mol_type = other DNA
aggccccagggccacac

SEQ ID NO: 182664 - DNA, 17 bp, synthetic construct
  source 1..17: mol_type = other DNA
caggccccagggccaca

SEQ ID NO: 182665 - DNA, 17 bp, synthetic construct
  source 1..17: mol_type = other DNA
tcaggccccagggccac

SEQ ID NO: 182666 - DNA, 17 bp, synthetic construct
  source 1..17: mol_type = other DNA
ttcaggccccagggcca

SEQ ID NO: 182667 - DNA, 17 bp, synthetic construct
  source 1..17: mol_type = other DNA
gttcaggccccagggcc

SEQ ID NO: 182668 - DNA, 17 bp, synthetic construct
  source 1..17: mol_type = other DNA
tgttcaggccccagggc

SEQ ID NO: 182669 - DNA, 17 bp, synthetic construct
  source 1..17: mol_type = other DNA
atgttcaggccccaggg

SEQ ID NO: 182670 - DNA, 17 bp, synthetic construct
  source 1..17: mol_type = other DNA
catgttcaggccccagg

SEQ ID NO: 182671 - DNA, 17 bp, synthetic construct
  source 1..17: mol_type = other DNA
acatgttcaggccccag

SEQ ID NO: 182672 - DNA, 17 bp, synthetic construct
  source 1..17: mol_type = other DNA
cacatgttcaggcccca

SEQ ID NO: 182673 - DNA, 17 bp, synthetic construct
  source 1..17: mol_type = other DNA
acacatgttcaggcccc

SEQ ID NO: 182674 - DNA, 17 bp, synthetic construct
  source 1..17: mol_type = other DNA
cacacatgttcaggccc

SEQ ID NO: 182675 - DNA, 17 bp, synthetic construct
  source 1..17: mol_type = other DNA
acacacatgttcaggcc

SEQ ID NO: 182676 - DNA, 17 bp, synthetic construct
  source 1..17: mol_type = other DNA
cacacacatgttcaggc

SEQ ID NO: 182677 - DNA, 17 bp, synthetic construct
  source 1..17: mol_type = other DNA
ccacacacatgttcagg

SEQ ID NO: 182678 - DNA, 17 bp, synthetic construct
  source 1..17: mol_type = other DNA
cccacacacatgttcag

SEQ ID NO: 182679 - DNA, 17 bp, synthetic construct
  source 1..17: mol_type = other DNA
tcccacacacatgttca

SEQ ID NO: 182680 - DNA, 17 bp, synthetic construct
  source 1..17: mol_type = other DNA
atcccacacacatgttc

SEQ ID NO: 182681 - DNA, 17 bp, synthetic construct
  source 1..17: mol_type = other DNA
catcccacacacatgtt

SEQ ID NO: 182682 - DNA, 17 bp, synthetic construct
  source 1..17: mol_type = other DNA
gcatcccacacacatgt

SEQ ID NO: 182683 - DNA, 17 bp, synthetic construct
  source 1..17: mol_type = other DNA
ggcatcccacacacatg

SEQ ID NO: 182684 - DNA, 17 bp, synthetic construct
  source 1..17: mol_type = other DNA
gggcatcccacacacat

SEQ ID NO: 182685 - DNA, 17 bp, synthetic construct
  source 1..17: mol_type = other DNA
ggggcatcccacacaca

SEQ ID NO: 182686 - DNA, 17 bp, synthetic construct
  source 1..17: mol_type = other DNA
cggggcatcccacacac

SEQ ID NO: 182687 - DNA, 17 bp, synthetic construct
  source 1..17: mol_type = other DNA
ccggggcatcccacaca

SEQ ID NO: 182688 - DNA, 17 bp, synthetic construct
  source 1..17: mol_type = other DNA
cccggggcatcccacac

SEQ ID NO: 182689 - DNA, 17 bp, synthetic construct
  source 1..17: mol_type = other DNA
ccccggggcatcccaca

SEQ ID NO: 182690 - DNA, 17 bp, synthetic construct
  source 1..17: mol_type = other DNA
gccccggggcatcccac

SEQ ID NO: 182691 - DNA, 17 bp, synthetic construct
  source 1..17: mol_type = other DNA
agccccggggcatccca

SEQ ID NO: 182692 - DNA, 17 bp, synthetic construct
  source 1..17: mol_type = other DNA
gagccccggggcatccc

SEQ ID NO: 182693 - DNA, 17 bp, synthetic construct
  source 1..17: mol_type = other DNA
agagccccggggcatcc

SEQ ID NO: 182694 - DNA, 17 bp, synthetic construct
  source 1..17: mol_type = other DNA
gagagccccggggcatc

SEQ ID NO: 182695 - DNA, 17 bp, synthetic construct
  source 1..17: mol_type = other DNA
agagagccccggggcat

SEQ ID NO: 182696 - DNA, 17 bp, synthetic construct
  source 1..17: mol_type = other DNA
cagagagccccggggca

SEQ ID NO: 182697 - DNA, 17 bp, synthetic construct
  source 1..17: mol_type = other DNA
tcagagagccccggggc

SEQ ID NO: 182698 - DNA, 17 bp, synthetic construct
  source 1..17: mol_type = other DNA
ctcagagagccccgggg

SEQ ID NO: 182699 - DNA, 17 bp, synthetic construct
  source 1..17: mol_type = other DNA
gctcagagagccccggg

SEQ ID NO: 182700 - DNA, 17 bp, synthetic construct
  source 1..17: mol_type = other DNA
ggctcagagagccccgg

SEQ ID NO: 182701 - DNA, 17 bp, synthetic construct
  source 1..17: mol_type = other DNA
gggctcagagagccccg

SEQ ID NO: 182702 - DNA, 17 bp, synthetic construct
  source 1..17: mol_type = other DNA
ggggctcagagagcccc

SEQ ID NO: 182703 - DNA, 17 bp, synthetic construct
  source 1..17: mol_type = other DNA
tggggctcagagagccc

SEQ ID NO: 182704 - DNA, 17 bp, synthetic construct
  source 1..17: mol_type = other DNA
gtggggctcagagagcc

SEQ ID NO: 182705 - DNA, 17 bp, synthetic construct
  source 1..17: mol_type = other DNA
agtggggctcagagagc

SEQ ID NO: 182706 - DNA, 17 bp, synthetic construct
  source 1..17: mol_type = other DNA
gagtggggctcagagag

SEQ ID NO: 182707 - DNA, 17 bp, synthetic construct
  source 1..17: mol_type = other DNA
ggagtggggctcagaga

SEQ ID NO: 182708 - DNA, 17 bp, synthetic construct
  source 1..17: mol_type = other DNA
aggagtggggctcagag

SEQ ID NO: 182709 - DNA, 17 bp, synthetic construct
  source 1..17: mol_type = other DNA
aaggagtggggctcaga

SEQ ID NO: 182710 - DNA, 17 bp, synthetic construct
  source 1..17: mol_type = other DNA
caaggagtggggctcag

SEQ ID NO: 182711 - DNA, 17 bp, synthetic construct
  source 1..17: mol_type = other DNA
acaaggagtggggctca

SEQ ID NO: 182712 - DNA, 17 bp, synthetic construct
  source 1..17: mol_type = other DNA
gacaaggagtggggctc

SEQ ID NO: 182713 - DNA, 17 bp, synthetic construct
  source 1..17: mol_type = other DNA
agacaaggagtggggct

SEQ ID NO: 182714 - DNA, 17 bp, synthetic construct
  source 1..17: mol_type = other DNA
aagacaaggagtggggc

SEQ ID NO: 182715 - DNA, 17 bp, synthetic construct
  source 1..17: mol_type = other DNA
caagacaaggagtgggg

SEQ ID NO: 182716 - DNA, 17 bp, synthetic construct
  source 1..17: mol_type = other DNA
tcaagacaaggagtggg

SEQ ID NO: 182717 - DNA, 17 bp, synthetic construct
  source 1..17: mol_type = other DNA
gtcaagacaaggagtgg

SEQ ID NO: 182718 - DNA, 17 bp, synthetic construct
  source 1..17: mol_type = other DNA
tgtcaagacaaggagtg

SEQ ID NO: 182719 - DNA, 17 bp, synthetic construct
  source 1..17: mol_type = other DNA
atgtcaagacaaggagt

SEQ ID NO: 182720 - DNA, 17 bp, synthetic construct
  source 1..17: mol_type = other DNA
aatgtcaagacaaggag

SEQ ID NO: 182721 - DNA, 17 bp, synthetic construct
  source 1..17: mol_type = other DNA
gaatgtcaagacaagga

SEQ ID NO: 182722 - DNA, 17 bp, synthetic construct
  source 1..17: mol_type = other DNA
ggaatgtcaagacaagg

SEQ ID NO: 182723 - DNA, 17 bp, synthetic construct
  source 1..17: mol_type = other DNA
aggaatgtcaagacaag

SEQ ID NO: 182724 - DNA, 17 bp, synthetic construct
  source 1..17: mol_type = other DNA
caggaatgtcaagacaa

SEQ ID NO: 182725 - DNA, 17 bp, synthetic construct
  source 1..17: mol_type = other DNA
gcaggaatgtcaagaca

SEQ ID NO: 182726 - DNA, 17 bp, synthetic construct
  source 1..17: mol_type = other DNA
ggcaggaatgtcaagac

SEQ ID NO: 182727 - DNA, 17 bp, synthetic construct
  source 1..17: mol_type = other DNA
gggcaggaatgtcaaga

SEQ ID NO: 182728 - DNA, 17 bp, synthetic construct
  source 1..17: mol_type = other DNA
agggcaggaatgtcaag

SEQ ID NO: 182729 - DNA, 17 bp, synthetic construct
  source 1..17: mol_type = other DNA
cagggcaggaatgtcaa

SEQ ID NO: 182730 - DNA, 17 bp, synthetic construct
  source 1..17: mol_type = other DNA
tcagggcaggaatgtca

SEQ ID NO: 182731 - DNA, 17 bp, synthetic construct
  source 1..17: mol_type = other DNA
ctcagggcaggaatgtc

SEQ ID NO: 182732 - DNA, 17 bp, synthetic construct
  source 1..17: mol_type = other DNA
cctcagggcaggaatgt

SEQ ID NO: 182733 - DNA, 17 bp, synthetic construct
  source 1..17: mol_type = other DNA
ccctcagggcaggaatg

SEQ ID NO: 182734 - DNA, 17 bp, synthetic construct
  source 1..17: mol_type = other DNA
gccctcagggcaggaat

SEQ ID NO: 182735 - DNA, 17 bp, synthetic construct
  source 1..17: mol_type = other DNA
ggccctcagggcaggaa

SEQ ID NO: 182736 - DNA, 17 bp, synthetic construct
  source 1..17: mol_type = other DNA
cggccctcagggcagga

SEQ ID NO: 182737 - DNA, 17 bp, synthetic construct
  source 1..17: mol_type = other DNA
tcggccctcagggcagg

SEQ ID NO: 182738 - DNA, 17 bp, synthetic construct
  source 1..17: mol_type = other DNA
atcggccctcagggcag

SEQ ID NO: 182739 - DNA, 17 bp, synthetic construct
  source 1..17: mol_type = other DNA
gatcggccctcagggca

SEQ ID NO: 182740 - DNA, 17 bp, synthetic construct
  source 1..17: mol_type = other DNA
ggatcggccctcagggc

SEQ ID NO: 182741 - DNA, 17 bp, synthetic construct
  source 1..17: mol_type = other DNA
cggatcggccctcaggg

SEQ ID NO: 182742 - DNA, 17 bp, synthetic construct
  source 1..17: mol_type = other DNA
gcggatcggccctcagg

SEQ ID NO: 182743 - DNA, 17 bp, synthetic construct
  source 1..17: mol_type = other DNA
tgcggatcggccctcag

SEQ ID NO: 182744 - DNA, 17 bp, synthetic construct
  source 1..17: mol_type = other DNA
gtgcggatcggccctca

SEQ ID NO: 182745 - DNA, 17 bp, synthetic construct
  source 1..17: mol_type = other DNA
tgtgcggatcggccctc

SEQ ID NO: 182746 - DNA, 17 bp, synthetic construct
  source 1..17: mol_type = other DNA
ctgtgcggatcggccct

SEQ ID NO: 182747 - DNA, 17 bp, synthetic construct
  source 1..17: mol_type = other DNA
cctgtgcggatcggccc

SEQ ID NO: 182748 - DNA, 17 bp, synthetic construct
  source 1..17: mol_type = other DNA
ccctgtgcggatcggcc

SEQ ID NO: 182749 - DNA, 17 bp, synthetic construct
  source 1..17: mol_type = other DNA
cccctgtgcggatcggc

SEQ ID NO: 182750 - DNA, 17 bp, synthetic construct
  source 1..17: mol_type = other DNA
gcccctgtgcggatcgg

SEQ ID NO: 182751 - DNA, 17 bp, synthetic construct
  source 1..17: mol_type = other DNA
ggcccctgtgcggatcg

SEQ ID NO: 182752 - DNA, 17 bp, synthetic construct
  source 1..17: mol_type = other DNA
gggcccctgtgcggatc

SEQ ID NO: 182753 - DNA, 17 bp, synthetic construct
  source 1..17: mol_type = other DNA
agggcccctgtgcggat

SEQ ID NO: 182754 - DNA, 17 bp, synthetic construct
  source 1..17: mol_type = other DNA
cagggcccctgtgcgga

SEQ ID NO: 182755 - DNA, 17 bp, synthetic construct
  source 1..17: mol_type = other DNA
ccagggcccctgtgcgg

SEQ ID NO: 182756 - DNA, 17 bp, synthetic construct
  source 1..17: mol_type = other DNA
tccagggcccctgtgcg

SEQ ID NO: 182757 - DNA, 17 bp, synthetic construct
  source 1..17: mol_type = other DNA
gtccagggcccctgtgc

SEQ ID NO: 182758 - DNA, 17 bp, synthetic construct
  source 1..17: mol_type = other DNA
tgtccagggcccctgtg

SEQ ID NO: 182759 - DNA, 17 bp, synthetic construct
  source 1..17: mol_type = other DNA
gtgtccagggcccctgt

SEQ ID NO: 182760 - DNA, 17 bp, synthetic construct
  source 1..17: mol_type = other DNA
cgtgtccagggcccctg

SEQ ID NO: 182761 - DNA, 17 bp, synthetic construct
  source 1..17: mol_type = other DNA
acgtgtccagggcccct

SEQ ID NO: 182762 - DNA, 17 bp, synthetic construct
  source 1..17: mol_type = other DNA
gacgtgtccagggcccc

SEQ ID NO: 182763 - DNA, 17 bp, synthetic construct
  source 1..17: mol_type = other DNA
tgacgtgtccagggccc

SEQ ID NO: 182764 - DNA, 17 bp, synthetic construct
  source 1..17: mol_type = other DNA
ctgacgtgtccagggcc

SEQ ID NO: 182765 - DNA, 17 bp, synthetic construct
  source 1..17: mol_type = other DNA
tctgacgtgtccagggc

SEQ ID NO: 182766 - DNA, 17 bp, synthetic construct
  source 1..17: mol_type = other DNA
ctctgacgtgtccaggg

SEQ ID NO: 182767 - DNA, 17 bp, synthetic construct
  source 1..17: mol_type = other DNA
gctctgacgtgtccagg

SEQ ID NO: 182768 - DNA, 17 bp, synthetic construct
  source 1..17: mol_type = other DNA
agctctgacgtgtccag

SEQ ID NO: 182769 - DNA, 17 bp, synthetic construct
  source 1..17: mol_type = other DNA
cagctctgacgtgtcca

SEQ ID NO: 182770 - DNA, 17 bp, synthetic construct
  source 1..17: mol_type = other DNA
ccagctctgacgtgtcc

SEQ ID NO: 182771 - DNA, 17 bp, synthetic construct
  source 1..17: mol_type = other DNA
cccagctctgacgtgtc

SEQ ID NO: 182772 - DNA, 17 bp, synthetic construct
  source 1..17: mol_type = other DNA
tcccagctctgacgtgt

SEQ ID NO: 182773 - DNA, 17 bp, synthetic construct
  source 1..17: mol_type = other DNA
gtcccagctctgacgtg

SEQ ID NO: 182774 - DNA, 17 bp, synthetic construct
  source 1..17: mol_type = other DNA
tgtcccagctctgacgt

SEQ ID NO: 182775 - DNA, 17 bp, synthetic construct
  source 1..17: mol_type = other DNA
atgtcccagctctgacg

SEQ ID NO: 182776 - DNA, 17 bp, synthetic construct
  source 1..17: mol_type = other DNA
catgtcccagctctgac

SEQ ID NO: 182777 - DNA, 17 bp, synthetic construct
  source 1..17: mol_type = other DNA
gcatgtcccagctctga

SEQ ID NO: 182778 - DNA, 17 bp, synthetic construct
  source 1..17: mol_type = other DNA
agcatgtcccagctctg

SEQ ID NO: 182779 - DNA, 17 bp, synthetic construct
  source 1..17: mol_type = other DNA
aagcatgtcccagctct

SEQ ID NO: 182780 - DNA, 17 bp, synthetic construct
  source 1..17: mol_type = other DNA
caagcatgtcccagctc

SEQ ID NO: 182781 - DNA, 17 bp, synthetic construct
  source 1..17: mol_type = other DNA
ccaagcatgtcccagct

SEQ ID NO: 182782 - DNA, 17 bp, synthetic construct
  source 1..17: mol_type = other DNA
cccaagcatgtcccagc

SEQ ID NO: 182783 - DNA, 17 bp, synthetic construct
  source 1..17: mol_type = other DNA
tcccaagcatgtcccag

SEQ ID NO: 182784 - DNA, 17 bp, synthetic construct
  source 1..17: mol_type = other DNA
gtcccaagcatgtccca

SEQ ID NO: 182785 - DNA, 17 bp, synthetic construct
  source 1..17: mol_type = other DNA
agtcccaagcatgtccc

SEQ ID NO: 182786 - DNA, 17 bp, synthetic construct
  source 1..17: mol_type = other DNA
gagtcccaagcatgtcc

SEQ ID NO: 182787 - DNA, 17 bp, synthetic construct
  source 1..17: mol_type = other DNA
tgagtcccaagcatgtc

SEQ ID NO: 182788 - DNA, 17 bp, synthetic construct
  source 1..17: mol_type = other DNA
ctgagtcccaagcatgt

SEQ ID NO: 182789 - DNA, 17 bp, synthetic construct
  source 1..17: mol_type = other DNA
cctgagtcccaagcatg

SEQ ID NO: 182790 - DNA, 17 bp, synthetic construct
  source 1..17: mol_type = other DNA
ccctgagtcccaagcat

SEQ ID NO: 182791 - DNA, 17 bp, synthetic construct
  source 1..17: mol_type = other DNA
cccctgagtcccaagca

SEQ ID NO: 182792 - DNA, 17 bp, synthetic construct
  source 1..17: mol_type = other DNA
gcccctgagtcccaagc

SEQ ID NO: 182793 - DNA, 17 bp, synthetic construct
  source 1..17: mol_type = other DNA
tgcccctgagtcccaag

SEQ ID NO: 182794 - DNA, 17 bp, synthetic construct
  source 1..17: mol_type = other DNA
gtgcccctgagtcccaa

SEQ ID NO: 182795 - DNA, 17 bp, synthetic construct
  source 1..17: mol_type = other DNA
ggtgcccctgagtccca

SEQ ID NO: 182796 - DNA, 17 bp, synthetic construct
  source 1..17: mol_type = other DNA
aggtgcccctgagtccc

SEQ ID NO: 182797 - DNA, 17 bp, synthetic construct
  source 1..17: mol_type = other DNA
aaggtgcccctgagtcc

SEQ ID NO: 182798 - DNA, 17 bp, synthetic construct
  source 1..17: mol_type = other DNA
taaggtgcccctgagtc

SEQ ID NO: 182799 - DNA, 17 bp, synthetic construct
  source 1..17: mol_type = other DNA
gtaaggtgcccctgagt

SEQ ID NO: 182800 - DNA, 17 bp, synthetic construct
  source 1..17: mol_type = other DNA
cgtaaggtgcccctgag

SEQ ID NO: 182801 - DNA, 17 bp, synthetic construct
  source 1..17: mol_type = other DNA
acgtaaggtgcccctga

SEQ ID NO: 182802 - DNA, 17 bp, synthetic construct
  source 1..17: mol_type = other DNA
gacgtaaggtgcccctg

SEQ ID NO: 182803 - DNA, 17 bp, synthetic construct
  source 1..17: mol_type = other DNA
cgacgtaaggtgcccct

SEQ ID NO: 182804 - DNA, 17 bp, synthetic construct
  source 1..17: mol_type = other DNA
tcgacgtaaggtgcccc

SEQ ID NO: 182805 - DNA, 17 bp, synthetic construct
  source 1..17: mol_type = other DNA
gtcgacgtaaggtgccc

SEQ ID NO: 182806 - DNA, 17 bp, synthetic construct
  source 1..17: mol_type = other DNA
tgtcgacgtaaggtgcc

SEQ ID NO: 182807 - DNA, 17 bp, synthetic construct
  source 1..17: mol_type = other DNA
ctgtcgacgtaaggtgc

SEQ ID NO: 182808 - DNA, 17 bp, synthetic construct
  source 1..17: mol_type = other DNA
gctgtcgacgtaaggtg

SEQ ID NO: 182809 - DNA, 17 bp, synthetic construct
  source 1..17: mol_type = other DNA
ggctgtcgacgtaaggt

SEQ ID NO: 182810 - DNA, 17 bp, synthetic construct
  source 1..17: mol_type = other DNA
tggctgtcgacgtaagg

SEQ ID NO: 182811 - DNA, 17 bp, synthetic construct
  source 1..17: mol_type = other DNA
atggctgtcgacgtaag

SEQ ID NO: 182812 - DNA, 17 bp, synthetic construct
  source 1..17: mol_type = other DNA
catggctgtcgacgtaa

SEQ ID NO: 182813 - DNA, 17 bp, synthetic construct
  source 1..17: mol_type = other DNA
tcatggctgtcgacgta

SEQ ID NO: 182814 - DNA, 17 bp, synthetic construct
  source 1..17: mol_type = other DNA
ctcatggctgtcgacgt

SEQ ID NO: 182815 - DNA, 17 bp, synthetic construct
  source 1..17: mol_type = other DNA
gctcatggctgtcgacg

SEQ ID NO: 182816 - DNA, 17 bp, synthetic construct
  source 1..17: mol_type = other DNA
agctcatggctgtcgac

SEQ ID NO: 182817 - DNA, 17 bp, synthetic construct
  source 1..17: mol_type = other DNA
gagctcatggctgtcga

SEQ ID NO: 182818 - DNA, 17 bp, synthetic construct
  source 1..17: mol_type = other DNA
ggagctcatggctgtcg

SEQ ID NO: 182819 - DNA, 17 bp, synthetic construct
  source 1..17: mol_type = other DNA
tggagctcatggctgtc

SEQ ID NO: 182820 - DNA, 17 bp, synthetic construct
  source 1..17: mol_type = other DNA
gtggagctcatggctgt

SEQ ID NO: 182821 - DNA, 17 bp, synthetic construct
  source 1..17: mol_type = other DNA
tgtggagctcatggctg

SEQ ID NO: 182822 - DNA, 17 bp, synthetic construct
  source 1..17: mol_type = other DNA
ttgtggagctcatggct

SEQ ID NO: 182823 - DNA, 17 bp, synthetic construct
  source 1..17: mol_type = other DNA
gttgtggagctcatggc

SEQ ID NO: 182824 - DNA, 17 bp, synthetic construct
  source 1..17: mol_type = other DNA
agttgtggagctcatgg

SEQ ID NO: 182825 - DNA, 17 bp, synthetic construct
  source 1..17: mol_type = other DNA
cagttgtggagctcatg

SEQ ID NO: 182826 - DNA, 17 bp, synthetic construct
  source 1..17: mol_type = other DNA
gcagttgtggagctcat

SEQ ID NO: 182827 - DNA, 17 bp, synthetic construct
  source 1..17: mol_type = other DNA
agcagttgtggagctca

SEQ ID NO: 182828 - DNA, 17 bp, synthetic construct
  source 1..17: mol_type = other DNA
cagcagttgtggagctc

SEQ ID NO: 182829 - DNA, 17 bp, synthetic construct
  source 1..17: mol_type = other DNA
gcagcagttgtggagct

SEQ ID NO: 182830 - DNA, 17 bp, synthetic construct
  source 1..17: mol_type = other DNA
ggcagcagttgtggagc

SEQ ID NO: 182831 - DNA, 17 bp, synthetic construct
  source 1..17: mol_type = other DNA
aggcagcagttgtggag

SEQ ID NO: 182832 - DNA, 17 bp, synthetic construct
  source 1..17: mol_type = other DNA
gaggcagcagttgtgga

SEQ ID NO: 182833 - DNA, 17 bp, synthetic construct
  source 1..17: mol_type = other DNA
agaggcagcagttgtgg

SEQ ID NO: 182834 - DNA, 17 bp, synthetic construct
  source 1..17: mol_type = other DNA
cagaggcagcagttgtg

SEQ ID NO: 182835 - DNA, 17 bp, synthetic construct
  source 1..17: mol_type = other DNA
tcagaggcagcagttgt

SEQ ID NO: 182836 - DNA, 17 bp, synthetic construct
  source 1..17: mol_type = other DNA
ctcagaggcagcagttg

SEQ ID NO: 182837 - DNA, 17 bp, synthetic construct
  source 1..17: mol_type = other DNA
tctcagaggcagcagtt

SEQ ID NO: 182838 - DNA, 17 bp, synthetic construct
  source 1..17: mol_type = other DNA
ctctcagaggcagcagt

SEQ ID NO: 182839 - DNA, 17 bp, synthetic construct
  source 1..17: mol_type = other DNA
cctctcagaggcagcag

SEQ ID NO: 182840 - DNA, 17 bp, synthetic construct
  source 1..17: mol_type = other DNA
acctctcagaggcagca

SEQ ID NO: 182841 - DNA, 17 bp, synthetic construct
  source 1..17: mol_type = other DNA
gacctctcagaggcagc

SEQ ID NO: 182842 - DNA, 17 bp, synthetic construct
  source 1..17: mol_type = other DNA
ggacctctcagaggcag

SEQ ID NO: 182843 - DNA, 17 bp, synthetic construct
  source 1..17: mol_type = other DNA
gggacctctcagaggca

SEQ ID NO: 182844 - DNA, 17 bp, synthetic construct
  source 1..17: mol_type = other DNA
agggacctctcagaggc

SEQ ID NO: 182845 - DNA, 17 bp, synthetic construct
  source 1..17: mol_type = other DNA
aagggacctctcagagg

SEQ ID NO: 182846 - DNA, 17 bp, synthetic construct
  source 1..17: mol_type = other DNA
gaagggacctctcagag

SEQ ID NO: 182847 - DNA, 17 bp, synthetic construct
  source 1..17: mol_type = other DNA
tgaagggacctctcaga

SEQ ID NO: 182848 - DNA, 17 bp, synthetic construct
  source 1..17: mol_type = other DNA
ctgaagggacctctcag

SEQ ID NO: 182849 - DNA, 17 bp, synthetic construct
  source 1..17: mol_type = other DNA
cctgaagggacctctca

SEQ ID NO: 182850 - DNA, 17 bp, synthetic construct
  source 1..17: mol_type = other DNA
ccctgaagggacctctc

SEQ ID NO: 182851 - DNA, 17 bp, synthetic construct
  source 1..17: mol_type = other DNA
cccctgaagggacctct

SEQ ID NO: 182852 - DNA, 17 bp, synthetic construct
  source 1..17: mol_type = other DNA
gcccctgaagggacctc

SEQ ID NO: 182853 - DNA, 17 bp, synthetic construct
  source 1..17: mol_type = other DNA
agcccctgaagggacct

SEQ ID NO: 182854 - DNA, 17 bp, synthetic construct
  source 1..17: mol_type = other DNA
gagcccctgaagggacc

SEQ ID NO: 182855 - DNA, 17 bp, synthetic construct
  source 1..17: mol_type = other DNA
ggagcccctgaagggac

SEQ ID NO: 182856 - DNA, 17 bp, synthetic construct
  source 1..17: mol_type = other DNA
gggagcccctgaaggga

SEQ ID NO: 182857 - DNA, 17 bp, synthetic construct
  source 1..17: mol_type = other DNA
tgggagcccctgaaggg

SEQ ID NO: 182858 - DNA, 17 bp, synthetic construct
  source 1..17: mol_type = other DNA
ctgggagcccctgaagg

SEQ ID NO: 182859 - DNA, 17 bp, synthetic construct
  source 1..17: mol_type = other DNA
gctgggagcccctgaag

SEQ ID NO: 182860 - DNA, 17 bp, synthetic construct
  source 1..17: mol_type = other DNA
tgctgggagcccctgaa

SEQ ID NO: 182861 - DNA, 17 bp, synthetic construct
  source 1..17: mol_type = other DNA
ttgctgggagcccctga

SEQ ID NO: 182862 - DNA, 17 bp, synthetic construct
  source 1..17: mol_type = other DNA
gttgctgggagcccctg

SEQ ID NO: 182863 - DNA, 17 bp, synthetic construct
  source 1..17: mol_type = other DNA
tgttgctgggagcccct

SEQ ID NO: 182864 - DNA, 17 bp, synthetic construct
  source 1..17: mol_type = other DNA
ctgttgctgggagcccc

SEQ ID NO: 182865 - DNA, 17 bp, synthetic construct
  source 1..17: mol_type = other DNA
gctgttgctgggagccc

SEQ ID NO: 182866 - DNA, 17 bp, synthetic construct
  source 1..17: mol_type = other DNA
ggctgttgctgggagcc

SEQ ID NO: 182867 - DNA, 17 bp, synthetic construct
  source 1..17: mol_type = other DNA
aggctgttgctgggagc

SEQ ID NO: 182868 - DNA, 17 bp, synthetic construct
  source 1..17: mol_type = other DNA
caggctgttgctgggag

SEQ ID NO: 182869 - DNA, 17 bp, synthetic construct
  source 1..17: mol_type = other DNA
ccaggctgttgctggga

SEQ ID NO: 182870 - DNA, 17 bp, synthetic construct
  source 1..17: mol_type = other DNA
cccaggctgttgctggg

SEQ ID NO: 182871 - DNA, 17 bp, synthetic construct
  source 1..17: mol_type = other DNA
ccccaggctgttgctgg

SEQ ID NO: 182872 - DNA, 17 bp, synthetic construct
  source 1..17: mol_type = other DNA
cccccaggctgttgctg

SEQ ID NO: 182873 - DNA, 17 bp, synthetic construct
  source 1..17: mol_type = other DNA
gcccccaggctgttgct

SEQ ID NO: 182874 - DNA, 17 bp, synthetic construct
  source 1..17: mol_type = other DNA
tgcccccaggctgttgc

SEQ ID NO: 182875 - DNA, 17 bp, synthetic construct
  source 1..17: mol_type = other DNA
ctgcccccaggctgttg

SEQ ID NO: 182876 - DNA, 17 bp, synthetic construct
  source 1..17: mol_type = other DNA
gctgcccccaggctgtt

SEQ ID NO: 182877 - DNA, 17 bp, synthetic construct
  source 1..17: mol_type = other DNA
tgctgcccccaggctgt

SEQ ID NO: 182878 - DNA, 17 bp, synthetic construct
  source 1..17: mol_type = other DNA
gtgctgcccccaggctg

SEQ ID NO: 182879 - DNA, 17 bp, synthetic construct
  source 1..17: mol_type = other DNA
tgtgctgcccccaggct

SEQ ID NO: 182880 - DNA, 17 bp, synthetic construct
  source 1..17: mol_type = other DNA
gtgtgctgcccccaggc

SEQ ID NO: 182881 - DNA, 17 bp, synthetic construct
  source 1..17: mol_type = other DNA
tgtgtgctgcccccagg

SEQ ID NO: 182882 - DNA, 17 bp, synthetic construct
  source 1..17: mol_type = other DNA
gtgtgtgctgcccccag

SEQ ID NO: 182883 - DNA, 17 bp, synthetic construct
  source 1..17: mol_type = other DNA
agtgtgtgctgccccca

SEQ ID NO: 182884 - DNA, 17 bp, synthetic construct
  source 1..17: mol_type = other DNA
cagtgtgtgctgccccc

SEQ ID NO: 182885 - DNA, 17 bp, synthetic construct
  source 1..17: mol_type = other DNA
ccagtgtgtgctgcccc

SEQ ID NO: 182886 - DNA, 17 bp, synthetic construct
  source 1..17: mol_type = other DNA
gccagtgtgtgctgccc

SEQ ID NO: 182887 - DNA, 17 bp, synthetic construct
  source 1..17: mol_type = other DNA
ggccagtgtgtgctgcc

SEQ ID NO: 182888 - DNA, 17 bp, synthetic construct
  source 1..17: mol_type = other DNA
aggccagtgtgtgctgc

SEQ ID NO: 182889 - DNA, 17 bp, synthetic construct
  source 1..17: mol_type = other DNA
caggccagtgtgtgctg

SEQ ID NO: 182890 - DNA, 17 bp, synthetic construct
  source 1..17: mol_type = other DNA
ccaggccagtgtgtgct

SEQ ID NO: 182891 - DNA, 17 bp, synthetic construct
  source 1..17: mol_type = other DNA
cccaggccagtgtgtgc

SEQ ID NO: 182892 - DNA, 17 bp, synthetic construct
  source 1..17: mol_type = other DNA
ccccaggccagtgtgtg

SEQ ID NO: 182893 - DNA, 17 bp, synthetic construct
  source 1..17: mol_type = other DNA
accccaggccagtgtgt

SEQ ID NO: 182894 - DNA, 17 bp, synthetic construct
  source 1..17: mol_type = other DNA
gaccccaggccagtgtg

SEQ ID NO: 182895 - DNA, 17 bp, synthetic construct
  source 1..17: mol_type = other DNA
ggaccccaggccagtgt

SEQ ID NO: 182896 - DNA, 17 bp, synthetic construct
  source 1..17: mol_type = other DNA
gggaccccaggccagtg

SEQ ID NO: 182897 - DNA, 17 bp, synthetic construct
  source 1..17: mol_type = other DNA
ggggaccccaggccagt

SEQ ID NO: 182898 - DNA, 17 bp, synthetic construct
  source 1..17: mol_type = other DNA
cggggaccccaggccag

SEQ ID NO: 182899 - DNA, 17 bp, synthetic construct
  source 1..17: mol_type = other DNA
gcggggaccccaggcca

SEQ ID NO: 182900 - DNA, 17 bp, synthetic construct
  source 1..17: mol_type = other DNA
ggcggggaccccaggcc

SEQ ID NO: 182901 - DNA, 17 bp, synthetic construct
  source 1..17: mol_type = other DNA
aggcggggaccccaggc

SEQ ID NO: 182902 - DNA, 17 bp, synthetic construct
  source 1..17: mol_type = other DNA
caggcggggaccccagg

SEQ ID NO: 182903 - DNA, 17 bp, synthetic construct
  source 1..17: mol_type = other DNA
gcaggcggggaccccag

SEQ ID NO: 182904 - DNA, 17 bp, synthetic construct
  source 1..17: mol_type = other DNA
ggcaggcggggacccca

SEQ ID NO: 182905 - DNA, 17 bp, synthetic construct
  source 1..17: mol_type = other DNA
gggcaggcggggacccc

SEQ ID NO: 182906 - DNA, 17 bp, synthetic construct
  source 1..17: mol_type = other DNA
cgggcaggcggggaccc

SEQ ID NO: 182907 - DNA, 17 bp, synthetic construct
  source 1..17: mol_type = other DNA
gcgggcaggcggggacc

SEQ ID NO: 182908 - DNA, 17 bp, synthetic construct
  source 1..17: mol_type = other DNA
ggcgggcaggcggggac

SEQ ID NO: 182909 - DNA, 17 bp, synthetic construct
  source 1..17: mol_type = other DNA
gggcgggcaggcgggga

SEQ ID NO: 182910 - DNA, 17 bp, synthetic construct
  source 1..17: mol_type = other DNA
tgggcgggcaggcgggg

SEQ ID NO: 182911 - DNA, 17 bp, synthetic construct
  source 1..17: mol_type = other DNA
ctgggcgggcaggcggg

SEQ ID NO: 182912 - DNA, 17 bp, synthetic construct
  source 1..17: mol_type = other DNA
tctgggcgggcaggcgg

SEQ ID NO: 182913 - DNA, 17 bp, synthetic construct
  source 1..17: mol_type = other DNA
atctgggcgggcaggcg

SEQ ID NO: 182914 - DNA, 17 bp, synthetic construct
  source 1..17: mol_type = other DNA
aatctgggcgggcaggc

SEQ ID NO: 182915 - DNA, 17 bp, synthetic construct
  source 1..17: mol_type = other DNA
gaatctgggcgggcagg

SEQ ID NO: 182916 - DNA, 17 bp, synthetic construct
  source 1..17: mol_type = other DNA
ggaatctgggcgggcag

SEQ ID NO: 182917 - DNA, 17 bp, synthetic construct
  source 1..17: mol_type = other DNA
aggaatctgggcgggca

SEQ ID NO: 182918 - DNA, 17 bp, synthetic construct
  source 1..17: mol_type = other DNA
taggaatctgggcgggc

SEQ ID NO: 182919 - DNA, 17 bp, synthetic construct
  source 1..17: mol_type = other DNA
gtaggaatctgggcggg

SEQ ID NO: 182920 - DNA, 17 bp, synthetic construct
  source 1..17: mol_type = other DNA
ggtaggaatctgggcgg

SEQ ID NO: 182921 - DNA, 17 bp, synthetic construct
  source 1..17: mol_type = other DNA
gggtaggaatctgggcg

SEQ ID NO: 182922 - DNA, 17 bp, synthetic construct
  source 1..17: mol_type = other DNA
cgggtaggaatctgggc

SEQ ID NO: 182923 - DNA, 17 bp, synthetic construct
  source 1..17: mol_type = other DNA
gcgggtaggaatctggg

SEQ ID NO: 182924 - DNA, 17 bp, synthetic construct
  source 1..17: mol_type = other DNA
ggcgggtaggaatctgg

SEQ ID NO: 182925 - DNA, 17 bp, synthetic construct
  source 1..17: mol_type = other DNA
gggcgggtaggaatctg

SEQ ID NO: 182926 - DNA, 17 bp, synthetic construct
  source 1..17: mol_type = other DNA
cgggcgggtaggaatct

SEQ ID NO: 182927 - DNA, 17 bp, synthetic construct
  source 1..17: mol_type = other DNA
ccgggcgggtaggaatc

SEQ ID NO: 182928 - DNA, 17 bp, synthetic construct
  source 1..17: mol_type = other DNA
tccgggcgggtaggaat

SEQ ID NO: 182929 - DNA, 17 bp, synthetic construct
  source 1..17: mol_type = other DNA
atccgggcgggtaggaa

SEQ ID NO: 182930 - DNA, 17 bp, synthetic construct
  source 1..17: mol_type = other DNA
aatccgggcgggtagga

SEQ ID NO: 182931 - DNA, 17 bp, synthetic construct
  source 1..17: mol_type = other DNA
gaatccgggcgggtagg

SEQ ID NO: 182932 - DNA, 17 bp, synthetic construct
  source 1..17: mol_type = other DNA
ggaatccgggcgggtag

SEQ ID NO: 182933 - DNA, 17 bp, synthetic construct
  source 1..17: mol_type = other DNA
aggaatccgggcgggta

SEQ ID NO: 182934 - DNA, 17 bp, synthetic construct
  source 1..17: mol_type = other DNA
caggaatccgggcgggt

SEQ ID NO: 182935 - DNA, 17 bp, synthetic construct
  source 1..17: mol_type = other DNA
gcaggaatccgggcggg

SEQ ID NO: 182936 - DNA, 17 bp, synthetic construct
  source 1..17: mol_type = other DNA
ggcaggaatccgggcgg

SEQ ID NO: 182937 - DNA, 17 bp, synthetic construct
  source 1..17: mol_type = other DNA
aggcaggaatccgggcg

SEQ ID NO: 182938 - DNA, 17 bp, synthetic construct
  source 1..17: mol_type = other DNA
caggcaggaatccgggc

SEQ ID NO: 182939 - DNA, 17 bp, synthetic construct
  source 1..17: mol_type = other DNA
gcaggcaggaatccggg

SEQ ID NO: 182940 - DNA, 17 bp, synthetic construct
  source 1..17: mol_type = other DNA
ggcaggcaggaatccgg

SEQ ID NO: 182941 - DNA, 17 bp, synthetic construct
  source 1..17: mol_type = other DNA
tggcaggcaggaatccg

SEQ ID NO: 182942 - DNA, 17 bp, synthetic construct
  source 1..17: mol_type = other DNA
ctggcaggcaggaatcc

SEQ ID NO: 182943 - DNA, 17 bp, synthetic construct
  source 1..17: mol_type = other DNA
tctggcaggcaggaatc

SEQ ID NO: 182944 - DNA, 17 bp, synthetic construct
  source 1..17: mol_type = other DNA
atctggcaggcaggaat

SEQ ID NO: 182945 - DNA, 17 bp, synthetic construct
  source 1..17: mol_type = other DNA
aatctggcaggcaggaa

SEQ ID NO: 182946 - DNA, 17 bp, synthetic construct
  source 1..17: mol_type = other DNA
gaatctggcaggcagga

SEQ ID NO: 182947 - DNA, 17 bp, synthetic construct
  source 1..17: mol_type = other DNA
ggaatctggcaggcagg

SEQ ID NO: 182948 - DNA, 17 bp, synthetic construct
  source 1..17: mol_type = other DNA
aggaatctggcaggcag

SEQ ID NO: 182949 - DNA, 17 bp, synthetic construct
  source 1..17: mol_type = other DNA
caggaatctggcaggca

SEQ ID NO: 182950 - DNA, 17 bp, synthetic construct
  source 1..17: mol_type = other DNA
gcaggaatctggcaggc

SEQ ID NO: 182951 - DNA, 17 bp, synthetic construct
  source 1..17: mol_type = other DNA
ggcaggaatctggcagg

SEQ ID NO: 182952 - DNA, 17 bp, synthetic construct
  source 1..17: mol_type = other DNA
gggcaggaatctggcag

SEQ ID NO: 182953 - DNA, 17 bp, synthetic construct
  source 1..17: mol_type = other DNA
ggggcaggaatctggca

SEQ ID NO: 182954 - DNA, 17 bp, synthetic construct
  source 1..17: mol_type = other DNA
gggggcaggaatctggc

SEQ ID NO: 182955 - DNA, 17 bp, synthetic construct
  source 1..17: mol_type = other DNA
tgggggcaggaatctgg

SEQ ID NO: 182956 - DNA, 17 bp, synthetic construct
  source 1..17: mol_type = other DNA
atgggggcaggaatctg

SEQ ID NO: 182957 - DNA, 17 bp, synthetic construct
  source 1..17: mol_type = other DNA
catgggggcaggaatct

SEQ ID NO: 182958 - DNA, 17 bp, synthetic construct
  source 1..17: mol_type = other DNA
ccatgggggcaggaatc

SEQ ID NO: 182959 - DNA, 17 bp, synthetic construct
  source 1..17: mol_type = other DNA
cccatgggggcaggaat

SEQ ID NO: 182960 - DNA, 17 bp, synthetic construct
  source 1..17: mol_type = other DNA
ccccatgggggcaggaa

SEQ ID NO: 182961 - DNA, 17 bp, synthetic construct
  source 1..17: mol_type = other DNA
accccatgggggcagga

SEQ ID NO: 182962 - DNA, 17 bp, synthetic construct
  source 1..17: mol_type = other DNA
gaccccatgggggcagg

SEQ ID NO: 182963 - DNA, 17 bp, synthetic construct
  source 1..17: mol_type = other DNA
agaccccatgggggcag

SEQ ID NO: 182964 - DNA, 17 bp, synthetic construct
  source 1..17: mol_type = other DNA
gagaccccatgggggca

SEQ ID NO: 182965 - DNA, 17 bp, synthetic construct
  source 1..17: mol_type = other DNA
agagaccccatgggggc

SEQ ID NO: 182966 - DNA, 17 bp, synthetic construct
  source 1..17: mol_type = other DNA
cagagaccccatggggg

SEQ ID NO: 182967 - DNA, 17 bp, synthetic construct
  source 1..17: mol_type = other DNA
gcagagaccccatgggg

SEQ ID NO: 182968 - DNA, 17 bp, synthetic construct
  source 1..17: mol_type = other DNA
ggcagagaccccatggg

SEQ ID NO: 182969 - DNA, 17 bp, synthetic construct
  source 1..17: mol_type = other DNA
gggcagagaccccatgg

SEQ ID NO: 182970 - DNA, 17 bp, synthetic construct
  source 1..17: mol_type = other DNA
tgggcagagaccccatg

SEQ ID NO: 182971 - DNA, 17 bp, synthetic construct
  source 1..17: mol_type = other DNA
gtgggcagagaccccat

SEQ ID NO: 182972 - DNA, 17 bp, synthetic construct
  source 1..17: mol_type = other DNA
ggtgggcagagacccca

SEQ ID NO: 182973 - DNA, 17 bp, synthetic construct
  source 1..17: mol_type = other DNA
gggtgggcagagacccc

SEQ ID NO: 182974 - DNA, 17 bp, synthetic construct
  source 1..17: mol_type = other DNA
tgggtgggcagagaccc

SEQ ID NO: 182975 - DNA, 17 bp, synthetic construct
  source 1..17: mol_type = other DNA
ctgggtgggcagagacc

SEQ ID NO: 182976 - DNA, 17 bp, synthetic construct
  source 1..17: mol_type = other DNA
tctgggtgggcagagac

SEQ ID NO: 182977 - DNA, 17 bp, synthetic construct
  source 1..17: mol_type = other DNA
atctgggtgggcagaga

SEQ ID NO: 182978 - DNA, 17 bp, synthetic construct
  source 1..17: mol_type = other DNA
aatctgggtgggcagag

SEQ ID NO: 182979 - DNA, 17 bp, synthetic construct
  source 1..17: mol_type = other DNA
gaatctgggtgggcaga

SEQ ID NO: 182980 - DNA, 17 bp, synthetic construct
  source 1..17: mol_type = other DNA
ggaatctgggtgggcag

SEQ ID NO: 182981 - DNA, 17 bp, synthetic construct
  source 1..17: mol_type = other DNA
aggaatctgggtgggca

SEQ ID NO: 182982 - DNA, 17 bp, synthetic construct
  source 1..17: mol_type = other DNA
caggaatctgggtgggc

SEQ ID NO: 182983 - DNA, 17 bp, synthetic construct
  source 1..17: mol_type = other DNA
gcaggaatctgggtggg

SEQ ID NO: 182984 - DNA, 17 bp, synthetic construct
  source 1..17: mol_type = other DNA
ggcaggaatctgggtgg

SEQ ID NO: 182985 - DNA, 17 bp, synthetic construct
  source 1..17: mol_type = other DNA
gggcaggaatctgggtg

SEQ ID NO: 182986 - DNA, 17 bp, synthetic construct
  source 1..17: mol_type = other DNA
tgggcaggaatctgggt

SEQ ID NO: 182987 - DNA, 17 bp, synthetic construct
  source 1..17: mol_type = other DNA
gtgggcaggaatctggg

SEQ ID NO: 182988 - DNA, 17 bp, synthetic construct
  source 1..17: mol_type = other DNA
tgtgggcaggaatctgg

SEQ ID NO: 182989 - DNA, 17 bp, synthetic construct
  source 1..17: mol_type = other DNA
atgtgggcaggaatctg

SEQ ID NO: 182990 - DNA, 17 bp, synthetic construct
  source 1..17: mol_type = other DNA
catgtgggcaggaatct

SEQ ID NO: 182991 - DNA, 17 bp, synthetic construct
  source 1..17: mol_type = other DNA
ccatgtgggcaggaatc

SEQ ID NO: 182992 - DNA, 17 bp, synthetic construct
  source 1..17: mol_type = other DNA
cccatgtgggcaggaat

SEQ ID NO: 182993 - DNA, 17 bp, synthetic construct
  source 1..17: mol_type = other DNA
ccccatgtgggcaggaa

SEQ ID NO: 182994 - DNA, 17 bp, synthetic construct
  source 1..17: mol_type = other DNA
accccatgtgggcagga

SEQ ID NO: 182995 - DNA, 17 bp, synthetic construct
  source 1..17: mol_type = other DNA
gaccccatgtgggcagg

SEQ ID NO: 182996 - DNA, 17 bp, synthetic construct
  source 1..17: mol_type = other DNA
agaccccatgtgggcag

SEQ ID NO: 182997 - DNA, 17 bp, synthetic construct
  source 1..17: mol_type = other DNA
gagaccccatgtgggca

SEQ ID NO: 182998 - DNA, 17 bp, synthetic construct
  source 1..17: mol_type = other DNA
agagaccccatgtgggc

SEQ ID NO: 182999 - DNA, 17 bp, synthetic construct
  source 1..17: mol_type = other DNA
cagagaccccatgtggg

SEQ ID NO: 183000 - DNA, 17 bp, synthetic construct
  source 1..17: mol_type = other DNA
gcagagaccccatgtgg

SEQ ID NO: 183001 - DNA, 17 bp, synthetic construct
  source 1..17: mol_type = other DNA
ggcagagaccccatgtg

SEQ ID NO: 183002 - DNA, 17 bp, synthetic construct
  source 1..17: mol_type = other DNA
aggcagagaccccatgt

SEQ ID NO: 183003 - DNA, 17 bp, synthetic construct
  source 1..17: mol_type = other DNA
caggcagagaccccatg

SEQ ID NO: 183004 - DNA, 17 bp, synthetic construct
  source 1..17: mol_type = other DNA
gcaggcagagaccccat

SEQ ID NO: 183005 - DNA, 17 bp, synthetic construct
  source 1..17: mol_type = other DNA
ggcaggcagagacccca

SEQ ID NO: 183006 - DNA, 17 bp, synthetic construct
  source 1..17: mol_type = other DNA
gggcaggcagagacccc

SEQ ID NO: 183007 - DNA, 17 bp, synthetic construct
  source 1..17: mol_type = other DNA
tgggcaggcagagaccc

SEQ ID NO: 183008 - DNA, 17 bp, synthetic construct
  source 1..17: mol_type = other DNA
ctgggcaggcagagacc

SEQ ID NO: 183009 - DNA, 17 bp, synthetic construct
  source 1..17: mol_type = other DNA
tctgggcaggcagagac

SEQ ID NO: 183010 - DNA, 17 bp, synthetic construct
  source 1..17: mol_type = other DNA
atctgggcaggcagaga

SEQ ID NO: 183011 - DNA, 17 bp, synthetic construct
  source 1..17: mol_type = other DNA
aatctgggcaggcagag

SEQ ID NO: 183012 - DNA, 17 bp, synthetic construct
  source 1..17: mol_type = other DNA
gaatctgggcaggcaga

SEQ ID NO: 183013 - DNA, 17 bp, synthetic construct
  source 1..17: mol_type = other DNA
ggaatctgggcaggcag

SEQ ID NO: 183014 - DNA, 17 bp, synthetic construct
  source 1..17: mol_type = other DNA
gggaatctgggcaggca

SEQ ID NO: 183015 - DNA, 17 bp, synthetic construct
  source 1..17: mol_type = other DNA
agggaatctgggcaggc

SEQ ID NO: 183016 - DNA, 17 bp, synthetic construct
  source 1..17: mol_type = other DNA
cagggaatctgggcagg

SEQ ID NO: 183017 - DNA, 17 bp, synthetic construct
  source 1..17: mol_type = other DNA
gcagggaatctgggcag

SEQ ID NO: 183018 - DNA, 17 bp, synthetic construct
  source 1..17: mol_type = other DNA
ggcagggaatctgggca

SEQ ID NO: 183019 - DNA, 17 bp, synthetic construct
  source 1..17: mol_type = other DNA
gggcagggaatctgggc

SEQ ID NO: 183020 - DNA, 17 bp, synthetic construct
  source 1..17: mol_type = other DNA
tgggcagggaatctggg

SEQ ID NO: 183021 - DNA, 17 bp, synthetic construct
  source 1..17: mol_type = other DNA
gtgggcagggaatctgg

SEQ ID NO: 183022 - DNA, 17 bp, synthetic construct
  source 1..17: mol_type = other DNA
ggtgggcagggaatctg

SEQ ID NO: 183023 - DNA, 17 bp, synthetic construct
  source 1..17: mol_type = other DNA
aggtgggcagggaatct

SEQ ID NO: 183024 - DNA, 17 bp, synthetic construct
  source 1..17: mol_type = other DNA
caggtgggcagggaatc

SEQ ID NO: 183025 - DNA, 17 bp, synthetic construct
  source 1..17: mol_type = other DNA
acaggtgggcagggaat

SEQ ID NO: 183026 - DNA, 17 bp, synthetic construct
  source 1..17: mol_type = other DNA
cacaggtgggcagggaa

SEQ ID NO: 183027 - DNA, 17 bp, synthetic construct
  source 1..17: mol_type = other DNA
ccacaggtgggcaggga

SEQ ID NO: 183028 - DNA, 17 bp, synthetic construct
  source 1..17: mol_type = other DNA
accacaggtgggcaggg

SEQ ID NO: 183029 - DNA, 17 bp, synthetic construct
  source 1..17: mol_type = other DNA
gaccacaggtgggcagg

SEQ ID NO: 183030 - DNA, 17 bp, synthetic construct
  source 1..17: mol_type = other DNA
ggaccacaggtgggcag

SEQ ID NO: 183031 - DNA, 17 bp, synthetic construct
  source 1..17: mol_type = other DNA
gggaccacaggtgggca

SEQ ID NO: 183032 - DNA, 17 bp, synthetic construct
  source 1..17: mol_type = other DNA
agggaccacaggtgggc

SEQ ID NO: 183033 - DNA, 17 bp, synthetic construct
  source 1..17: mol_type = other DNA
cagggaccacaggtggg

SEQ ID NO: 183034 - DNA, 17 bp, synthetic construct
  source 1..17: mol_type = other DNA
acagggaccacaggtgg

SEQ ID NO: 183035 - DNA, 17 bp, synthetic construct
  source 1..17: mol_type = other DNA
cacagggaccacaggtg

SEQ ID NO: 183036 - DNA, 17 bp, synthetic construct
  source 1..17: mol_type = other DNA
acacagggaccacaggt

SEQ ID NO: 183037 - DNA, 17 bp, synthetic construct
  source 1..17: mol_type = other DNA
cacacagggaccacagg

SEQ ID NO: 183038 - DNA, 17 bp, synthetic construct
  source 1..17: mol_type = other DNA
gcacacagggaccacag

SEQ ID NO: 183039 - DNA, 17 bp, synthetic construct
  source 1..17: mol_type = other DNA
tgcacacagggaccaca

SEQ ID NO: 183040 - DNA, 17 bp, synthetic construct
  source 1..17: mol_type = other DNA
atgcacacagggaccac

SEQ ID NO: 183041 - DNA, 17 bp, synthetic construct
  source 1..17: mol_type = other DNA
gatgcacacagggacca

SEQ ID NO: 183042 - DNA, 17 bp, synthetic construct
  source 1..17: mol_type = other DNA
tgatgcacacagggacc

SEQ ID NO: 183043 - DNA, 17 bp, synthetic construct
  source 1..17: mol_type = other DNA
ctgatgcacacagggac

SEQ ID NO: 183044 - DNA, 17 bp, synthetic construct
  source 1..17: mol_type = other DNA
gctgatgcacacaggga

SEQ ID NO: 183045 - DNA, 17 bp, synthetic construct
  source 1..17: mol_type = other DNA
agctgatgcacacaggg

SEQ ID NO: 183046 - DNA, 17 bp, synthetic construct
  source 1..17: mol_type = other DNA
gagctgatgcacacagg

SEQ ID NO: 183047 - DNA, 17 bp, synthetic construct
  source 1..17: mol_type = other DNA
ggagctgatgcacacag

SEQ ID NO: 183048 - DNA, 17 bp, synthetic construct
  source 1..17: mol_type = other DNA
gggagctgatgcacaca

SEQ ID NO: 183049 - DNA, 17 bp, synthetic construct
  source 1..17: mol_type = other DNA
agggagctgatgcacac

SEQ ID NO: 183050 - DNA, 17 bp, synthetic construct
  source 1..17: mol_type = other DNA
cagggagctgatgcaca

SEQ ID NO: 183051 - DNA, 17 bp, synthetic construct
  source 1..17: mol_type = other DNA
gcagggagctgatgcac

SEQ ID NO: 183052 - DNA, 17 bp, synthetic construct
  source 1..17: mol_type = other DNA
ggcagggagctgatgca

SEQ ID NO: 183053 - DNA, 17 bp, synthetic construct
  source 1..17: mol_type = other DNA
aggcagggagctgatgc

SEQ ID NO: 183054 - DNA, 17 bp, synthetic construct
  source 1..17: mol_type = other DNA
caggcagggagctgatg

SEQ ID NO: 183055 - DNA, 17 bp, synthetic construct
  source 1..17: mol_type = other DNA
gcaggcagggagctgat

SEQ ID NO: 183056 - DNA, 17 bp, synthetic construct
  source 1..17: mol_type = other DNA
ggcaggcagggagctga

SEQ ID NO: 183057 - DNA, 17 bp, synthetic construct
  source 1..17: mol_type = other DNA
aggcaggcagggagctg

SEQ ID NO: 183058 - DNA, 17 bp, synthetic construct
  source 1..17: mol_type = other DNA
caggcaggcagggagct

SEQ ID NO: 183059 - DNA, 17 bp, synthetic construct
  source 1..17: mol_type = other DNA
ccaggcaggcagggagc

SEQ ID NO: 183060 - DNA, 17 bp, synthetic construct
  source 1..17: mol_type = other DNA
cccaggcaggcagggag

SEQ ID NO: 183061 - DNA, 17 bp, synthetic construct
  source 1..17: mol_type = other DNA
acccaggcaggcaggga

SEQ ID NO: 183062 - DNA, 17 bp, synthetic construct
  source 1..17: mol_type = other DNA
gacccaggcaggcaggg

SEQ ID NO: 183063 - DNA, 17 bp, synthetic construct
  source 1..17: mol_type = other DNA
ggacccaggcaggcagg

SEQ ID NO: 183064 - DNA, 17 bp, synthetic construct
  source 1..17: mol_type = other DNA
tggacccaggcaggcag

SEQ ID NO: 183065 - DNA, 17 bp, synthetic construct
  source 1..17: mol_type = other DNA
atggacccaggcaggca

SEQ ID NO: 183066 - DNA, 17 bp, synthetic construct
  source 1..17: mol_type = other DNA
catggacccaggcaggc

SEQ ID NO: 183067 - DNA, 17 bp, synthetic construct
  source 1..17: mol_type = other DNA
gcatggacccaggcagg

SEQ ID NO: 183068 - DNA, 17 bp, synthetic construct
  source 1..17: mol_type = other DNA
agcatggacccaggcag

SEQ ID NO: 183069 - DNA, 17 bp, synthetic construct
  source 1..17: mol_type = other DNA
gagcatggacccaggca

SEQ ID NO: 183070 - DNA, 17 bp, synthetic construct
  source 1..17: mol_type = other DNA
tgagcatggacccaggc

SEQ ID NO: 183071 - DNA, 17 bp, synthetic construct
  source 1..17: mol_type = other DNA
ctgagcatggacccagg

SEQ ID NO: 183072 - DNA, 17 bp, synthetic construct
  source 1..17: mol_type = other DNA
gctgagcatggacccag

SEQ ID NO: 183073 - DNA, 17 bp, synthetic construct
  source 1..17: mol_type = other DNA
ggctgagcatggaccca

SEQ ID NO: 183074 - DNA, 17 bp, synthetic construct
  source 1..17: mol_type = other DNA
tggctgagcatggaccc

SEQ ID NO: 183075 - DNA, 17 bp, synthetic construct
  source 1..17: mol_type = other DNA
ctggctgagcatggacc

SEQ ID NO: 183076 - DNA, 17 bp, synthetic construct
  source 1..17: mol_type = other DNA
cctggctgagcatggac

SEQ ID NO: 183077 - DNA, 17 bp, synthetic construct
  source 1..17: mol_type = other DNA
ccctggctgagcatgga

SEQ ID NO: 183078 - DNA, 17 bp, synthetic construct
  source 1..17: mol_type = other DNA
cccctggctgagcatgg

SEQ ID NO: 183079 - DNA, 17 bp, synthetic construct
  source 1..17: mol_type = other DNA
acccctggctgagcatg

SEQ ID NO: 183080 - DNA, 17 bp, synthetic construct
  source 1..17: mol_type = other DNA
cacccctggctgagcat

SEQ ID NO: 183081 - DNA, 17 bp, synthetic construct
  source 1..17: mol_type = other DNA
gcacccctggctgagca

SEQ ID NO: 183082 - DNA, 17 bp, synthetic construct
  source 1..17: mol_type = other DNA
tgcacccctggctgagc

SEQ ID NO: 183083 - DNA, 17 bp, synthetic construct
  source 1..17: mol_type = other DNA
atgcacccctggctgag

SEQ ID NO: 183084 - DNA, 17 bp, synthetic construct
  source 1..17: mol_type = other DNA
gatgcacccctggctga

SEQ ID NO: 183085 - DNA, 17 bp, synthetic construct
  source 1..17: mol_type = other DNA
agatgcacccctggctg

SEQ ID NO: 183086 - DNA, 17 bp, synthetic construct
  source 1..17: mol_type = other DNA
tagatgcacccctggct

SEQ ID NO: 183087 - DNA, 17 bp, synthetic construct
  source 1..17: mol_type = other DNA
atagatgcacccctggc

SEQ ID NO: 183088 - DNA, 17 bp, synthetic construct
  source 1..17: mol_type = other DNA
catagatgcacccctgg

SEQ ID NO: 183089 - DNA, 17 bp, synthetic construct
  source 1..17: mol_type = other DNA
gcatagatgcacccctg

SEQ ID NO: 183090 - DNA, 17 bp, synthetic construct
  source 1..17: mol_type = other DNA
agcatagatgcacccct

SEQ ID NO: 183091 - DNA, 17 bp, synthetic construct
  source 1..17: mol_type = other DNA
gagcatagatgcacccc

SEQ ID NO: 183092 - DNA, 17 bp, synthetic construct
  source 1..17: mol_type = other DNA
ggagcatagatgcaccc

SEQ ID NO: 183093 - DNA, 17 bp, synthetic construct
  source 1..17: mol_type = other DNA
tggagcatagatgcacc

SEQ ID NO: 183094 - DNA, 17 bp, synthetic construct
  source 1..17: mol_type = other DNA
atggagcatagatgcac

SEQ ID NO: 183095 - DNA, 17 bp, synthetic construct
  source 1..17: mol_type = other DNA
gatggagcatagatgca

SEQ ID NO: 183096 - DNA, 17 bp, synthetic construct
  source 1..17: mol_type = other DNA
agatggagcatagatgc

SEQ ID NO: 183097 - DNA, 17 bp, synthetic construct
  source 1..17: mol_type = other DNA
cagatggagcatagatg

SEQ ID NO: 183098 - DNA, 17 bp, synthetic construct
  source 1..17: mol_type = other DNA
tcagatggagcatagat

SEQ ID NO: 183099 - DNA, 17 bp, synthetic construct
  source 1..17: mol_type = other DNA
ctcagatggagcataga

SEQ ID NO: 183100 - DNA, 17 bp, synthetic construct
  source 1..17: mol_type = other DNA
cctcagatggagcatag

SEQ ID NO: 183101 - DNA, 17 bp, synthetic construct
  source 1..17: mol_type = other DNA
tcctcagatggagcata

SEQ ID NO: 183102 - DNA, 17 bp, synthetic construct
  source 1..17: mol_type = other DNA
ttcctcagatggagcat

SEQ ID NO: 183103 - DNA, 17 bp, synthetic construct
  source 1..17: mol_type = other DNA
cttcctcagatggagca

SEQ ID NO: 183104 - DNA, 17 bp, synthetic construct
  source 1..17: mol_type = other DNA
ccttcctcagatggagc

SEQ ID NO: 183105 - DNA, 17 bp, synthetic construct
  source 1..17: mol_type = other DNA
tccttcctcagatggag

SEQ ID NO: 183106 - DNA, 17 bp, synthetic construct
  source 1..17: mol_type = other DNA
ttccttcctcagatgga

SEQ ID NO: 183107 - DNA, 17 bp, synthetic construct
  source 1..17: mol_type = other DNA
gttccttcctcagatgg

SEQ ID NO: 183108 - DNA, 17 bp, synthetic construct
  source 1..17: mol_type = other DNA
tgttccttcctcagatg

SEQ ID NO: 183109 - DNA, 17 bp, synthetic construct
  source 1..17: mol_type = other DNA
ttgttccttcctcagat

SEQ ID NO: 183110 - DNA, 17 bp, synthetic construct
  source 1..17: mol_type = other DNA
gttgttccttcctcaga

SEQ ID NO: 183111 - DNA, 17 bp, synthetic construct
  source 1..17: mol_type = other DNA
agttgttccttcctcag

SEQ ID NO: 183112 - DNA, 17 bp, synthetic construct
  source 1..17: mol_type = other DNA
gagttgttccttcctca

SEQ ID NO: 183113 - DNA, 17 bp, synthetic construct
  source 1..17: mol_type = other DNA
ggagttgttccttcctc

SEQ ID NO: 183114 - DNA, 17 bp, synthetic construct
  source 1..17: mol_type = other DNA
gggagttgttccttcct

SEQ ID NO: 183115 - DNA, 17 bp, synthetic construct
  source 1..17: mol_type = other DNA
agggagttgttccttcc

SEQ ID NO: 183116 - DNA, 17 bp, synthetic construct
  source 1..17: mol_type = other DNA
cagggagttgttccttc

SEQ ID NO: 183117 - DNA, 17 bp, synthetic construct
  source 1..17: mol_type = other DNA
gcagggagttgttcctt

SEQ ID NO: 183118 - DNA, 17 bp, synthetic construct
  source 1..17: mol_type = other DNA
tgcagggagttgttcct

SEQ ID NO: 183119 - DNA, 17 bp, synthetic construct
  source 1..17: mol_type = other DNA
ctgcagggagttgttcc

SEQ ID NO: 183120 - DNA, 17 bp, synthetic construct
  source 1..17: mol_type = other DNA
cctgcagggagttgttc

SEQ ID NO: 183121 - DNA, 17 bp, synthetic construct
  source 1..17: mol_type = other DNA
gcctgcagggagttgtt

SEQ ID NO: 183122 - DNA, 17 bp, synthetic construct
  source 1..17: mol_type = other DNA
ggcctgcagggagttgt

SEQ ID NO: 183123 - DNA, 17 bp, synthetic construct
  source 1..17: mol_type = other DNA
gggcctgcagggagttg

SEQ ID NO: 183124 - DNA, 17 bp, synthetic construct
  source 1..17: mol_type = other DNA
ggggcctgcagggagtt

SEQ ID NO: 183125 - DNA, 17 bp, synthetic construct
  source 1..17: mol_type = other DNA
tggggcctgcagggagt

SEQ ID NO: 183126 - DNA, 17 bp, synthetic construct
  source 1..17: mol_type = other DNA
atggggcctgcagggag

SEQ ID NO: 183127 - DNA, 17 bp, synthetic construct
  source 1..17: mol_type = other DNA
aatggggcctgcaggga

SEQ ID NO: 183128 - DNA, 17 bp, synthetic construct
  source 1..17: mol_type = other DNA
caatggggcctgcaggg

SEQ ID NO: 183129 - DNA, 17 bp, synthetic construct
  source 1..17: mol_type = other DNA
ccaatggggcctgcagg

SEQ ID NO: 183130 - DNA, 17 bp, synthetic construct
  source 1..17: mol_type = other DNA
cccaatggggcctgcag

SEQ ID NO: 183131 - DNA, 17 bp, synthetic construct
  source 1..17: mol_type = other DNA
acccaatggggcctgca

SEQ ID NO: 183132 - DNA, 17 bp, synthetic construct
  source 1..17: mol_type = other DNA
gacccaatggggcctgc

SEQ ID NO: 183133 - DNA, 17 bp, synthetic construct
  source 1..17: mol_type = other DNA
tgacccaatggggcctg

SEQ ID NO: 183134 - DNA, 17 bp, synthetic construct
  source 1..17: mol_type = other DNA
atgacccaatggggcct

SEQ ID NO: 183135 - DNA, 17 bp, synthetic construct
  source 1..17: mol_type = other DNA
catgacccaatggggcc

SEQ ID NO: 183136 - DNA, 17 bp, synthetic construct
  source 1..17: mol_type = other DNA
ccatgacccaatggggc

SEQ ID NO: 183137 - DNA, 17 bp, synthetic construct
  source 1..17: mol_type = other DNA
cccatgacccaatgggg

SEQ ID NO: 183138 - DNA, 17 bp, synthetic construct
  source 1..17: mol_type = other DNA
ccccatgacccaatggg

SEQ ID NO: 183139 - DNA, 17 bp, synthetic construct
  source 1..17: mol_type = other DNA
tccccatgacccaatgg

SEQ ID NO: 183140 - DNA, 17 bp, synthetic construct
  source 1..17: mol_type = other DNA
ctccccatgacccaatg

SEQ ID NO: 183141 - DNA, 17 bp, synthetic construct
  source 1..17: mol_type = other DNA
cctccccatgacccaat

SEQ ID NO: 183142 - DNA, 17 bp, synthetic construct
  source 1..17: mol_type = other DNA
ccctccccatgacccaa

SEQ ID NO: 183143 - DNA, 17 bp, synthetic construct
  source 1..17: mol_type = other DNA
cccctccccatgaccca

SEQ ID NO: 183144 - DNA, 17 bp, synthetic construct
  source 1..17: mol_type = other DNA
acccctccccatgaccc

SEQ ID NO: 183145 - DNA, 17 bp, synthetic construct
  source 1..17: mol_type = other DNA
gacccctccccatgacc

SEQ ID NO: 183146 - DNA, 17 bp, synthetic construct
  source 1..17: mol_type = other DNA
ggacccctccccatgac

SEQ ID NO: 183147 - DNA, 17 bp, synthetic construct
  source 1..17: mol_type = other DNA
aggacccctccccatga

SEQ ID NO: 183148 - DNA, 17 bp, synthetic construct
  source 1..17: mol_type = other DNA
caggacccctccccatg

SEQ ID NO: 183149 - DNA, 17 bp, synthetic construct
  source 1..17: mol_type = other DNA
ccaggacccctccccat

SEQ ID NO: 183150 - DNA, 17 bp, synthetic construct
  source 1..17: mol_type = other DNA
gccaggacccctcccca

SEQ ID NO: 183151 - DNA, 17 bp, synthetic construct
  source 1..17: mol_type = other DNA
ggccaggacccctcccc

SEQ ID NO: 183152 - DNA, 17 bp, synthetic construct
  source 1..17: mol_type = other DNA
gggccaggacccctccc

SEQ ID NO: 183153 - DNA, 17 bp, synthetic construct
  source 1..17: mol_type = other DNA
agggccaggacccctcc

SEQ ID NO: 183154 - DNA, 17 bp, synthetic construct
  source 1..17: mol_type = other DNA
cagggccaggacccctc

SEQ ID NO: 183155 - DNA, 17 bp, synthetic construct
  source 1..17: mol_type = other DNA
acagggccaggacccct

SEQ ID NO: 183156 - DNA, 17 bp, synthetic construct
  source 1..17: mol_type = other DNA
aacagggccaggacccc

SEQ ID NO: 183157 - DNA, 17 bp, synthetic construct
  source 1..17: mol_type = other DNA
caacagggccaggaccc

SEQ ID NO: 183158 - DNA, 17 bp, synthetic construct
  source 1..17: mol_type = other DNA
gcaacagggccaggacc

SEQ ID NO: 183159 - DNA, 17 bp, synthetic construct
  source 1..17: mol_type = other DNA
ggcaacagggccaggac

SEQ ID NO: 183160 - DNA, 17 bp, synthetic construct
  source 1..17: mol_type = other DNA
gggcaacagggccagga

SEQ ID NO: 183161 - DNA, 17 bp, synthetic construct
  source 1..17: mol_type = other DNA
ggggcaacagggccagg

SEQ ID NO: 183162 - DNA, 17 bp, synthetic construct
  source 1..17: mol_type = other DNA
tggggcaacagggccag

SEQ ID NO: 183163 - DNA, 17 bp, synthetic construct
  source 1..17: mol_type = other DNA
gtggggcaacagggcca

SEQ ID NO: 183164 - DNA, 17 bp, synthetic construct
  source 1..17: mol_type = other DNA
ggtggggcaacagggcc

SEQ ID NO: 183165 - DNA, 17 bp, synthetic construct
  source 1..17: mol_type = other DNA
tggtggggcaacagggc

SEQ ID NO: 183166 - DNA, 17 bp, synthetic construct
  source 1..17: mol_type = other DNA
ctggtggggcaacaggg

SEQ ID NO: 183167 - DNA, 17 bp, synthetic construct
  source 1..17: mol_type = other DNA
actggtggggcaacagg

SEQ ID NO: 183168 - DNA, 17 bp, synthetic construct
  source 1..17: mol_type = other DNA
cactggtggggcaacag

SEQ ID NO: 183169 - DNA, 17 bp, synthetic construct
  source 1..17: mol_type = other DNA
gcactggtggggcaaca

SEQ ID NO: 183170 - DNA, 17 bp, synthetic construct
  source 1..17: mol_type = other DNA
ggcactggtggggcaac

SEQ ID NO: 183171 - DNA, 17 bp, synthetic construct
  source 1..17: mol_type = other DNA
gggcactggtggggcaa

SEQ ID NO: 183172 - DNA, 17 bp, synthetic construct
  source 1..17: mol_type = other DNA
agggcactggtggggca

SEQ ID NO: 183173 - DNA, 17 bp, synthetic construct
  source 1..17: mol_type = other DNA
gagggcactggtggggc

SEQ ID NO: 183174 - DNA, 17 bp, synthetic construct
  source 1..17: mol_type = other DNA
tgagggcactggtgggg

SEQ ID NO: 183175 - DNA, 17 bp, synthetic construct
  source 1..17: mol_type = other DNA
ctgagggcactggtggg

SEQ ID NO: 183176 - DNA, 17 bp, synthetic construct
  source 1..17: mol_type = other DNA
actgagggcactggtgg

SEQ ID NO: 183177 - DNA, 17 bp, synthetic construct
  source 1..17: mol_type = other DNA
cactgagggcactggtg

SEQ ID NO: 183178 - DNA, 17 bp, synthetic construct
  source 1..17: mol_type = other DNA
gcactgagggcactggt

SEQ ID NO: 183179 - DNA, 17 bp, synthetic construct
  source 1..17: mol_type = other DNA
ggcactgagggcactgg

SEQ ID NO: 183180 - DNA, 17 bp, synthetic construct
  source 1..17: mol_type = other DNA
tggcactgagggcactg

SEQ ID NO: 183181 - DNA, 17 bp, synthetic construct
  source 1..17: mol_type = other DNA
gtggcactgagggcact

SEQ ID NO: 183182 - DNA, 17 bp, synthetic construct
  source 1..17: mol_type = other DNA
ggtggcactgagggcac

SEQ ID NO: 183183 - DNA, 17 bp, synthetic construct
  source 1..17: mol_type = other DNA
gggtggcactgagggca

SEQ ID NO: 183184 - DNA, 17 bp, synthetic construct
  source 1..17: mol_type = other DNA
agggtggcactgagggc

SEQ ID NO: 183185 - DNA, 17 bp, synthetic construct
  source 1..17: mol_type = other DNA
gagggtggcactgaggg

SEQ ID NO: 183186 - DNA, 17 bp, synthetic construct
  source 1..17: mol_type = other DNA
ggagggtggcactgagg

SEQ ID NO: 183187 - DNA, 17 bp, synthetic construct
  source 1..17: mol_type = other DNA
gggagggtggcactgag

SEQ ID NO: 183188 - DNA, 17 bp, synthetic construct
  source 1..17: mol_type = other DNA
tgggagggtggcactga

SEQ ID NO: 183189 - DNA, 17 bp, synthetic construct
  source 1..17: mol_type = other DNA
gtgggagggtggcactg

SEQ ID NO: 183190 - DNA, 17 bp, synthetic construct
  source 1..17: mol_type = other DNA
ggtgggagggtggcact

SEQ ID NO: 183191 - DNA, 17 bp, synthetic construct
  source 1..17: mol_type = other DNA
gggtgggagggtggcac

SEQ ID NO: 183192 - DNA, 17 bp, synthetic construct
  source 1..17: mol_type = other DNA
ggggtgggagggtggca

SEQ ID NO: 183193 - DNA, 17 bp, synthetic construct
  source 1..17: mol_type = other DNA
aggggtgggagggtggc

SEQ ID NO: 183194 - DNA, 17 bp, synthetic construct
  source 1..17: mol_type = other DNA
aaggggtgggagggtgg

SEQ ID NO: 183195 - DNA, 17 bp, synthetic construct
  source 1..17: mol_type = other DNA
caaggggtgggagggtg

SEQ ID NO: 183196 - DNA, 17 bp, synthetic construct
  source 1..17: mol_type = other DNA
gcaaggggtgggagggt

SEQ ID NO: 183197 - DNA, 17 bp, synthetic construct
  source 1..17: mol_type = other DNA
tgcaaggggtgggaggg

SEQ ID NO: 183198 - DNA, 17 bp, synthetic construct
  source 1..17: mol_type = other DNA
ctgcaaggggtgggagg

SEQ ID NO: 183199 - DNA, 17 bp, synthetic construct
  source 1..17: mol_type = other DNA
cctgcaaggggtgggag

SEQ ID NO: 183200 - DNA, 17 bp, synthetic construct
  source 1..17: mol_type = other DNA
acctgcaaggggtggga

SEQ ID NO: 183201 - DNA, 17 bp, synthetic construct
  source 1..17: mol_type = other DNA
aacctgcaaggggtggg

SEQ ID NO: 183202 - DNA, 17 bp, synthetic construct
  source 1..17: mol_type = other DNA
caacctgcaaggggtgg

SEQ ID NO: 183203 - DNA, 17 bp, synthetic construct
  source 1..17: mol_type = other DNA
ccaacctgcaaggggtg

SEQ ID NO: 183204 - DNA, 17 bp, synthetic construct
  source 1..17: mol_type = other DNA
accaacctgcaaggggt

SEQ ID NO: 183205 - DNA, 17 bp, synthetic construct
  source 1..17: mol_type = other DNA
caccaacctgcaagggg

SEQ ID NO: 183206 - DNA, 17 bp, synthetic construct
  source 1..17: mol_type = other DNA
gcaccaacctgcaaggg

SEQ ID NO: 183207 - DNA, 17 bp, synthetic construct
  source 1..17: mol_type = other DNA
tgcaccaacctgcaagg

SEQ ID NO: 183208 - DNA, 17 bp, synthetic construct
  source 1..17: mol_type = other DNA
ttgcaccaacctgcaag

SEQ ID NO: 183209 - DNA, 17 bp, synthetic construct
  source 1..17: mol_type = other DNA
gttgcaccaacctgcaa

SEQ ID NO: 183210 - DNA, 17 bp, synthetic construct
  source 1..17: mol_type = other DNA
ggttgcaccaacctgca

SEQ ID NO: 183211 - DNA, 17 bp, synthetic construct
  source 1..17: mol_type = other DNA
aggttgcaccaacctgc

SEQ ID NO: 183212 - DNA, 17 bp, synthetic construct
  source 1..17: mol_type = other DNA
aaggttgcaccaacctg

SEQ ID NO: 183213 - DNA, 17 bp, synthetic construct
  source 1..17: mol_type = other DNA
gaaggttgcaccaacct

SEQ ID NO: 183214 - DNA, 17 bp, synthetic construct
  source 1..17: mol_type = other DNA
ggaaggttgcaccaacc

SEQ ID NO: 183215 - DNA, 17 bp, synthetic construct
  source 1..17: mol_type = other DNA
gggaaggttgcaccaac

SEQ ID NO: 183216 - DNA, 17 bp, synthetic construct
  source 1..17: mol_type = other DNA
tgggaaggttgcaccaa

SEQ ID NO: 183217 - DNA, 17 bp, synthetic construct
  source 1..17: mol_type = other DNA
ctgggaaggttgcacca

SEQ ID NO: 183218 - DNA, 17 bp, synthetic construct
  source 1..17: mol_type = other DNA
cctgggaaggttgcacc

SEQ ID NO: 183219 - DNA, 17 bp, synthetic construct
  source 1..17: mol_type = other DNA
gcctgggaaggttgcac

SEQ ID NO: 183220 - DNA, 17 bp, synthetic construct
  source 1..17: mol_type = other DNA
cgcctgggaaggttgca

SEQ ID NO: 183221 - DNA, 17 bp, synthetic construct
  source 1..17: mol_type = other DNA
gcgcctgggaaggttgc

SEQ ID NO: 183222 - DNA, 17 bp, synthetic construct
  source 1..17: mol_type = other DNA
ggcgcctgggaaggttg

SEQ ID NO: 183223 - DNA, 17 bp, synthetic construct
  source 1..17: mol_type = other DNA
gggcgcctgggaaggtt

SEQ ID NO: 183224 - DNA, 17 bp, synthetic construct
  source 1..17: mol_type = other DNA
agggcgcctgggaaggt

SEQ ID NO: 183225 - DNA, 17 bp, synthetic construct
  source 1..17: mol_type = other DNA
aagggcgcctgggaagg

SEQ ID NO: 183226 - DNA, 17 bp, synthetic construct
  source 1..17: mol_type = other DNA
gaagggcgcctgggaag

SEQ ID NO: 183227 - DNA, 17 bp, synthetic construct
  source 1..17: mol_type = other DNA
ggaagggcgcctgggaa

SEQ ID NO: 183228 - DNA, 17 bp, synthetic construct
  source 1..17: mol_type = other DNA
gggaagggcgcctggga

SEQ ID NO: 183229 - DNA, 17 bp, synthetic construct
  source 1..17: mol_type = other DNA
agggaagggcgcctggg

SEQ ID NO: 183230 - DNA, 17 bp, synthetic construct
  source 1..17: mol_type = other DNA
cagggaagggcgcctgg

SEQ ID NO: 183231 - DNA, 17 bp, synthetic construct
  source 1..17: mol_type = other DNA
gcagggaagggcgcctg

SEQ ID NO: 183232 - DNA, 17 bp, synthetic construct
  source 1..17: mol_type = other DNA
ggcagggaagggcgcct

SEQ ID NO: 183233 - DNA, 17 bp, synthetic construct
  source 1..17: mol_type = other DNA
tggcagggaagggcgcc

SEQ ID NO: 183234 - DNA, 17 bp, synthetic construct
  source 1..17: mol_type = other DNA
gtggcagggaagggcgc

SEQ ID NO: 183235 - DNA, 17 bp, synthetic construct
  source 1..17: mol_type = other DNA
tgtggcagggaagggcg

SEQ ID NO: 183236 - DNA, 17 bp, synthetic construct
  source 1..17: mol_type = other DNA
atgtggcagggaagggc

SEQ ID NO: 183237 - DNA, 17 bp, synthetic construct
  source 1..17: mol_type = other DNA
catgtggcagggaaggg

SEQ ID NO: 183238 - DNA, 17 bp, synthetic construct
  source 1..17: mol_type = other DNA
acatgtggcagggaagg

SEQ ID NO: 183239 - DNA, 17 bp, synthetic construct
  source 1..17: mol_type = other DNA
cacatgtggcagggaag

SEQ ID NO: 183240 - DNA, 17 bp, synthetic construct
  source 1..17: mol_type = other DNA
acacatgtggcagggaa

SEQ ID NO: 183241 - DNA, 17 bp, synthetic construct
  source 1..17: mol_type = other DNA
tacacatgtggcaggga

SEQ ID NO: 183242 - DNA, 17 bp, synthetic construct
  source 1..17: mol_type = other DNA
gtacacatgtggcaggg

SEQ ID NO: 183243 - DNA, 17 bp, synthetic construct
  source 1..17: mol_type = other DNA
ggtacacatgtggcagg

SEQ ID NO: 183244 - DNA, 17 bp, synthetic construct
  source 1..17: mol_type = other DNA
aggtacacatgtggcag

SEQ ID NO: 183245 - DNA, 17 bp, synthetic construct
  source 1..17: mol_type = other DNA
caggtacacatgtggca

SEQ ID NO: 183246 - DNA, 17 bp, synthetic construct
  source 1..17: mol_type = other DNA
gcaggtacacatgtggc

SEQ ID NO: 183247 - DNA, 17 bp, synthetic construct
  source 1..17: mol_type = other DNA
ggcaggtacacatgtgg

SEQ ID NO: 183248 - DNA, 17 bp, synthetic construct
  source 1..17: mol_type = other DNA
aggcaggtacacatgtg

SEQ ID NO: 183249 - DNA, 17 bp, synthetic construct
  source 1..17: mol_type = other DNA
gaggcaggtacacatgt

SEQ ID NO: 183250 - DNA, 17 bp, synthetic construct
  source 1..17: mol_type = other DNA
agaggcaggtacacatg

SEQ ID NO: 183251 - DNA, 17 bp, synthetic construct
  source 1..17: mol_type = other DNA
gagaggcaggtacacat

SEQ ID NO: 183252 - DNA, 17 bp, synthetic construct
  source 1..17: mol_type = other DNA
agagaggcaggtacaca

SEQ ID NO: 183253 - DNA, 17 bp, synthetic construct
  source 1..17: mol_type = other DNA
cagagaggcaggtacac

SEQ ID NO: 183254 - DNA, 17 bp, synthetic construct
  source 1..17: mol_type = other DNA
ccagagaggcaggtaca

SEQ ID NO: 183255 - DNA, 17 bp, synthetic construct
  source 1..17: mol_type = other DNA
cccagagaggcaggtac

SEQ ID NO: 183256 - DNA, 17 bp, synthetic construct
  source 1..17: mol_type = other DNA
ccccagagaggcaggta

SEQ ID NO: 183257 - DNA, 17 bp, synthetic construct
  source 1..17: mol_type = other DNA
tccccagagaggcaggt

SEQ ID NO: 183258 - DNA, 17 bp, synthetic construct
  source 1..17: mol_type = other DNA
gtccccagagaggcagg

SEQ ID NO: 183259 - DNA, 17 bp, synthetic construct
  source 1..17: mol_type = other DNA
tgtccccagagaggcag

SEQ ID NO: 183260 - DNA, 17 bp, synthetic construct
  source 1..17: mol_type = other DNA
gtgtccccagagaggca

SEQ ID NO: 183261 - DNA, 17 bp, synthetic construct
  source 1..17: mol_type = other DNA
ggtgtccccagagaggc

SEQ ID NO: 183262 - DNA, 17 bp, synthetic construct
  source 1..17: mol_type = other DNA
gggtgtccccagagagg

SEQ ID NO: 183263 - DNA, 17 bp, synthetic construct
  source 1..17: mol_type = other DNA
tgggtgtccccagagag

SEQ ID NO: 183264 - DNA, 17 bp, synthetic construct
  source 1..17: mol_type = other DNA
ctgggtgtccccagaga

SEQ ID NO: 183265 - DNA, 17 bp, synthetic construct
  source 1..17: mol_type = other DNA
cctgggtgtccccagag

SEQ ID NO: 183266 - DNA, 17 bp, synthetic construct
  source 1..17: mol_type = other DNA
tcctgggtgtccccaga

SEQ ID NO: 183267 - DNA, 17 bp, synthetic construct
  source 1..17: mol_type = other DNA
gtcctgggtgtccccag

SEQ ID NO: 183268 - DNA, 17 bp, synthetic construct
  source 1..17: mol_type = other DNA
ggtcctgggtgtcccca

SEQ ID NO: 183269 - DNA, 17 bp, synthetic construct
  source 1..17: mol_type = other DNA
gggtcctgggtgtcccc

SEQ ID NO: 183270 - DNA, 17 bp, synthetic construct
  source 1..17: mol_type = other DNA
tgggtcctgggtgtccc

SEQ ID NO: 183271 - DNA, 17 bp, synthetic construct
  source 1..17: mol_type = other DNA
ttgggtcctgggtgtcc

SEQ ID NO: 183272 - DNA, 17 bp, synthetic construct
  source 1..17: mol_type = other DNA
gttgggtcctgggtgtc

SEQ ID NO: 183273 - DNA, 17 bp, synthetic construct
  source 1..17: mol_type = other DNA
cgttgggtcctgggtgt

SEQ ID NO: 183274 - DNA, 17 bp, synthetic construct
  source 1..17: mol_type = other DNA
ccgttgggtcctgggtg

SEQ ID NO: 183275 - DNA, 17 bp, synthetic construct
  source 1..17: mol_type = other DNA
accgttgggtcctgggt

SEQ ID NO: 183276 - DNA, 17 bp, synthetic construct
  source 1..17: mol_type = other DNA
caccgttgggtcctggg

SEQ ID NO: 183277 - DNA, 17 bp, synthetic construct
  source 1..17: mol_type = other DNA
gcaccgttgggtcctgg

SEQ ID NO: 183278 - DNA, 17 bp, synthetic construct
  source 1..17: mol_type = other DNA
tgcaccgttgggtcctg

SEQ ID NO: 183279 - DNA, 17 bp, synthetic construct
  source 1..17: mol_type = other DNA
ttgcaccgttgggtcct

SEQ ID NO: 183280 - DNA, 17 bp, synthetic construct
  source 1..17: mol_type = other DNA
attgcaccgttgggtcc

SEQ ID NO: 183281 - DNA, 17 bp, synthetic construct
  source 1..17: mol_type = other DNA
cattgcaccgttgggtc

SEQ ID NO: 183282 - DNA, 17 bp, synthetic construct
  source 1..17: mol_type = other DNA
acattgcaccgttgggt

SEQ ID NO: 183283 - DNA, 17 bp, synthetic construct
  source 1..17: mol_type = other DNA
gacattgcaccgttggg

SEQ ID NO: 183284 - DNA, 17 bp, synthetic construct
  source 1..17: mol_type = other DNA
tgacattgcaccgttgg

SEQ ID NO: 183285 - DNA, 17 bp, synthetic construct
  source 1..17: mol_type = other DNA
ctgacattgcaccgttg

SEQ ID NO: 183286 - DNA, 17 bp, synthetic construct
  source 1..17: mol_type = other DNA
cctgacattgcaccgtt

SEQ ID NO: 183287 - DNA, 17 bp, synthetic construct
  source 1..17: mol_type = other DNA
tcctgacattgcaccgt

SEQ ID NO: 183288 - DNA, 17 bp, synthetic construct
  source 1..17: mol_type = other DNA
ctcctgacattgcaccg

SEQ ID NO: 183289 - DNA, 17 bp, synthetic construct
  source 1..17: mol_type = other DNA
cctcctgacattgcacc

SEQ ID NO: 183290 - DNA, 17 bp, synthetic construct
  source 1..17: mol_type = other DNA
tcctcctgacattgcac

SEQ ID NO: 183291 - DNA, 17 bp, synthetic construct
  source 1..17: mol_type = other DNA
atcctcctgacattgca

SEQ ID NO: 183292 - DNA, 17 bp, synthetic construct
  source 1..17: mol_type = other DNA
catcctcctgacattgc

SEQ ID NO: 183293 - DNA, 17 bp, synthetic construct
  source 1..17: mol_type = other DNA
gcatcctcctgacattg

SEQ ID NO: 183294 - DNA, 17 bp, synthetic construct
  source 1..17: mol_type = other DNA
ggcatcctcctgacatt

SEQ ID NO: 183295 - DNA, 17 bp, synthetic construct
  source 1..17: mol_type = other DNA
aggcatcctcctgacat

SEQ ID NO: 183296 - DNA, 17 bp, synthetic construct
  source 1..17: mol_type = other DNA
caggcatcctcctgaca

SEQ ID NO: 183297 - DNA, 17 bp, synthetic construct
  source 1..17: mol_type = other DNA
gcaggcatcctcctgac

SEQ ID NO: 183298 - DNA, 17 bp, synthetic construct
  source 1..17: mol_type = other DNA
tgcaggcatcctcctga

SEQ ID NO: 183299 - DNA, 17 bp, synthetic construct
  source 1..17: mol_type = other DNA
ttgcaggcatcctcctg

SEQ ID NO: 183300 - DNA, 17 bp, synthetic construct
  source 1..17: mol_type = other DNA
gttgcaggcatcctcct

SEQ ID NO: 183301 - DNA, 17 bp, synthetic construct
  source 1..17: mol_type = other DNA
tgttgcaggcatcctcc

SEQ ID NO: 183302 - DNA, 17 bp, synthetic construct
  source 1..17: mol_type = other DNA
ttgttgcaggcatcctc

SEQ ID NO: 183303 - DNA, 17 bp, synthetic construct
  source 1..17: mol_type = other DNA
attgttgcaggcatcct

SEQ ID NO: 183304 - DNA, 17 bp, synthetic construct
  source 1..17: mol_type = other DNA
tattgttgcaggcatcc

SEQ ID NO: 183305 - DNA, 17 bp, synthetic construct
  source 1..17: mol_type = other DNA
gtattgttgcaggcatc

SEQ ID NO: 183306 - DNA, 17 bp, synthetic construct
  source 1..17: mol_type = other DNA
agtattgttgcaggcat

SEQ ID NO: 183307 - DNA, 17 bp, synthetic construct
  source 1..17: mol_type = other DNA
tagtattgttgcaggca

SEQ ID NO: 183308 - DNA, 17 bp, synthetic construct
  source 1..17: mol_type = other DNA
gtagtattgttgcaggc

SEQ ID NO: 183309 - DNA, 17 bp, synthetic construct
  source 1..17: mol_type = other DNA
ggtagtattgttgcagg

SEQ ID NO: 183310 - DNA, 17 bp, synthetic construct
  source 1..17: mol_type = other DNA
aggtagtattgttgcag

SEQ ID NO: 183311 - DNA, 17 bp, synthetic construct
  source 1..17: mol_type = other DNA
caggtagtattgttgca

SEQ ID NO: 183312 - DNA, 17 bp, synthetic construct
  source 1..17: mol_type = other DNA
acaggtagtattgttgc

SEQ ID NO: 183313 - DNA, 17 bp, synthetic construct
  source 1..17: mol_type = other DNA
gacaggtagtattgttg

SEQ ID NO: 183314 - DNA, 17 bp, synthetic construct
  source 1..17: mol_type = other DNA
ggacaggtagtattgtt

SEQ ID NO: 183315 - DNA, 17 bp, synthetic construct
  source 1..17: mol_type = other DNA
gggacaggtagtattgt

SEQ ID NO: 183316 - DNA, 17 bp, synthetic construct
  source 1..17: mol_type = other DNA
ggggacaggtagtattg

SEQ ID NO: 183317 - DNA, 17 bp, synthetic construct
  source 1..17: mol_type = other DNA
tggggacaggtagtatt

SEQ ID NO: 183318 - DNA, 17 bp, synthetic construct
  source 1..17: mol_type = other DNA
ctggggacaggtagtat

SEQ ID NO: 183319 - DNA, 17 bp, synthetic construct
  source 1..17: mol_type = other DNA
cctggggacaggtagta

SEQ ID NO: 183320 - DNA, 17 bp, synthetic construct
  source 1..17: mol_type = other DNA
acctggggacaggtagt

SEQ ID NO: 183321 - DNA, 17 bp, synthetic construct
  source 1..17: mol_type = other DNA
cacctggggacaggtag

SEQ ID NO: 183322 - DNA, 17 bp, synthetic construct
  source 1..17: mol_type = other DNA
tcacctggggacaggta

SEQ ID NO: 183323 - DNA, 17 bp, synthetic construct
  source 1..17: mol_type = other DNA
ctcacctggggacaggt

SEQ ID NO: 183324 - DNA, 17 bp, synthetic construct
  source 1..17: mol_type = other DNA
tctcacctggggacagg

SEQ ID NO: 183325 - DNA, 17 bp, synthetic construct
  source 1..17: mol_type = other DNA
gtctcacctggggacag

SEQ ID NO: 183326 - DNA, 17 bp, synthetic construct
  source 1..17: mol_type = other DNA
ggtctcacctggggaca

SEQ ID NO: 183327 - DNA, 17 bp, synthetic construct
  source 1..17: mol_type = other DNA
gggtctcacctggggac

SEQ ID NO: 183328 - DNA, 17 bp, synthetic construct
  source 1..17: mol_type = other DNA
cgggtctcacctgggga

SEQ ID NO: 183329 - DNA, 17 bp, synthetic construct
  source 1..17: mol_type = other DNA
tcgggtctcacctgggg

SEQ ID NO: 183330 - DNA, 17 bp, synthetic construct
  source 1..17: mol_type = other DNA
ctcgggtctcacctggg

SEQ ID NO: 183331 - DNA, 17 bp, synthetic construct
  source 1..17: mol_type = other DNA
cctcgggtctcacctgg

SEQ ID NO: 183332 - DNA, 17 bp, synthetic construct
  source 1..17: mol_type = other DNA
gcctcgggtctcacctg

SEQ ID NO: 183333 - DNA, 17 bp, synthetic construct
  source 1..17: mol_type = other DNA
tgcctcgggtctcacct

SEQ ID NO: 183334 - DNA, 17 bp, synthetic construct
  source 1..17: mol_type = other DNA
gtgcctcgggtctcacc

SEQ ID NO: 183335 - DNA, 17 bp, synthetic construct
  source 1..17: mol_type = other DNA
ggtgcctcgggtctcac

SEQ ID NO: 183336 - DNA, 17 bp, synthetic construct
  source 1..17: mol_type = other DNA
aggtgcctcgggtctca

SEQ ID NO: 183337 - DNA, 17 bp, synthetic construct
  source 1..17: mol_type = other DNA
caggtgcctcgggtctc

SEQ ID NO: 183338 - DNA, 17 bp, synthetic construct
  source 1..17: mol_type = other DNA
gcaggtgcctcgggtct

SEQ ID NO: 183339 - DNA, 17 bp, synthetic construct
  source 1..17: mol_type = other DNA
ggcaggtgcctcgggtc

SEQ ID NO: 183340 - DNA, 17 bp, synthetic construct
  source 1..17: mol_type = other DNA
gggcaggtgcctcgggt

SEQ ID NO: 183341 - DNA, 17 bp, synthetic construct
  source 1..17: mol_type = other DNA
ggggcaggtgcctcggg

SEQ ID NO: 183342 - DNA, 17 bp, synthetic construct
  source 1..17: mol_type = other DNA
gggggcaggtgcctcgg

SEQ ID NO: 183343 - DNA, 17 bp, synthetic construct
  source 1..17: mol_type = other DNA
tgggggcaggtgcctcg

SEQ ID NO: 183344 - DNA, 17 bp, synthetic construct
  source 1..17: mol_type = other DNA
ctgggggcaggtgcctc

SEQ ID NO: 183345 - DNA, 17 bp, synthetic construct
  source 1..17: mol_type = other DNA
cctgggggcaggtgcct

SEQ ID NO: 183346 - DNA, 17 bp, synthetic construct
  source 1..17: mol_type = other DNA
acctgggggcaggtgcc

SEQ ID NO: 183347 - DNA, 17 bp, synthetic construct
  source 1..17: mol_type = other DNA
cacctgggggcaggtgc

SEQ ID NO: 183348 - DNA, 17 bp, synthetic construct
  source 1..17: mol_type = other DNA
tcacctgggggcaggtg

SEQ ID NO: 183349 - DNA, 17 bp, synthetic construct
  source 1..17: mol_type = other DNA
ctcacctgggggcaggt

SEQ ID NO: 183350 - DNA, 17 bp, synthetic construct
  source 1..17: mol_type = other DNA
gctcacctgggggcagg

SEQ ID NO: 183351 - DNA, 17 bp, synthetic construct
  source 1..17: mol_type = other DNA
ggctcacctgggggcag

SEQ ID NO: 183352 - DNA, 17 bp, synthetic construct
  source 1..17: mol_type = other DNA
gggctcacctgggggca

SEQ ID NO: 183353 - DNA, 17 bp, synthetic construct
  source 1..17: mol_type = other DNA
ggggctcacctgggggc

SEQ ID NO: 183354 - DNA, 17 bp, synthetic construct
  source 1..17: mol_type = other DNA
gggggctcacctggggg

SEQ ID NO: 183355 - DNA, 17 bp, synthetic construct
  source 1..17: mol_type = other DNA
cgggggctcacctgggg

SEQ ID NO: 183356 - DNA, 17 bp, synthetic construct
  source 1..17: mol_type = other DNA
tcgggggctcacctggg

SEQ ID NO: 183357 - DNA, 17 bp, synthetic construct
  source 1..17: mol_type = other DNA
ctcgggggctcacctgg

SEQ ID NO: 183358 - DNA, 17 bp, synthetic construct
  source 1..17: mol_type = other DNA
cctcgggggctcacctg

SEQ ID NO: 183359 - DNA, 17 bp, synthetic construct
  source 1..17: mol_type = other DNA
gcctcgggggctcacct

SEQ ID NO: 183360 - DNA, 17 bp, synthetic construct
  source 1..17: mol_type = other DNA
tgcctcgggggctcacc

SEQ ID NO: 183361 - DNA, 17 bp, synthetic construct
  source 1..17: mol_type = other DNA
gtgcctcgggggctcac

SEQ ID NO: 183362 - DNA, 17 bp, synthetic construct
  source 1..17: mol_type = other DNA
ggtgcctcgggggctca

SEQ ID NO: 183363 - DNA, 17 bp, synthetic construct
  source 1..17: mol_type = other DNA
aggtgcctcgggggctc

SEQ ID NO: 183364 - DNA, 17 bp, synthetic construct
  source 1..17: mol_type = other DNA
caggtgcctcgggggct

SEQ ID NO: 183365 - DNA, 17 bp, synthetic construct
  source 1..17: mol_type = other DNA
gcaggtgcctcgggggc

SEQ ID NO: 183366 - DNA, 17 bp, synthetic construct
  source 1..17: mol_type = other DNA
ggcaggtgcctcggggg

SEQ ID NO: 183367 - DNA, 17 bp, synthetic construct
  source 1..17: mol_type = other DNA
gggcaggtgcctcgggg

SEQ ID NO: 183368 - DNA, 17 bp, synthetic construct
  source 1..17: mol_type = other DNA
ggggcaggtgcctcggg

SEQ ID NO: 183369 - DNA, 17 bp, synthetic construct
  source 1..17: mol_type = other DNA
gggggcaggtgcctcgg

SEQ ID NO: 183370 - DNA, 17 bp, synthetic construct
  source 1..17: mol_type = other DNA
tgggggcaggtgcctcg

SEQ ID NO: 183371 - DNA, 17 bp, synthetic construct
  source 1..17: mol_type = other DNA
ttgggggcaggtgcctc

SEQ ID NO: 183372 - DNA, 17 bp, synthetic construct
  source 1..17: mol_type = other DNA
cttgggggcaggtgcct

SEQ ID NO: 183373 - DNA, 17 bp, synthetic construct
  source 1..17: mol_type = other DNA
acttgggggcaggtgcc

SEQ ID NO: 183374 - DNA, 17 bp, synthetic construct
  source 1..17: mol_type = other DNA
cacttgggggcaggtgc

SEQ ID NO: 183375 - DNA, 17 bp, synthetic construct
  source 1..17: mol_type = other DNA
tcacttgggggcaggtg

SEQ ID NO: 183376 - DNA, 17 bp, synthetic construct
  source 1..17: mol_type = other DNA
ctcacttgggggcaggt

SEQ ID NO: 183377 - DNA, 17 bp, synthetic construct
  source 1..17: mol_type = other DNA
tctcacttgggggcagg

SEQ ID NO: 183378 - DNA, 17 bp, synthetic construct
  source 1..17: mol_type = other DNA
gtctcacttgggggcag

SEQ ID NO: 183379 - DNA, 17 bp, synthetic construct
  source 1..17: mol_type = other DNA
ggtctcacttgggggca

SEQ ID NO: 183380 - DNA, 17 bp, synthetic construct
  source 1..17: mol_type = other DNA
gggtctcacttgggggc

SEQ ID NO: 183381 - DNA, 17 bp, synthetic construct
  source 1..17: mol_type = other DNA
cgggtctcacttggggg

SEQ ID NO: 183382 - DNA, 17 bp, synthetic construct
  source 1..17: mol_type = other DNA
tcgggtctcacttgggg

SEQ ID NO: 183383 - DNA, 17 bp, synthetic construct
  source 1..17: mol_type = other DNA
ctcgggtctcacttggg

SEQ ID NO: 183384 - DNA, 17 bp, synthetic construct
  source 1..17: mol_type = other DNA
cctcgggtctcacttgg

SEQ ID NO: 183385 - DNA, 17 bp, synthetic construct
  source 1..17: mol_type = other DNA
gcctcgggtctcacttg

SEQ ID NO: 183386 - DNA, 17 bp, synthetic construct
  source 1..17: mol_type = other DNA
tgcctcgggtctcactt

SEQ ID NO: 183387 - DNA, 17 bp, synthetic construct
  source 1..17: mol_type = other DNA
gtgcctcgggtctcact

SEQ ID NO: 183388 - DNA, 17 bp, synthetic construct
  source 1..17: mol_type = other DNA
ggtgcctcgggtctcac

SEQ ID NO: 183389 - DNA, 17 bp, synthetic construct
  source 1..17: mol_type = other DNA
aggtgcctcgggtctca

SEQ ID NO: 183390 - DNA, 17 bp, synthetic construct
  source 1..17: mol_type = other DNA
caggtgcctcgggtctc

SEQ ID NO: 183391 - DNA, 17 bp, synthetic construct
  source 1..17: mol_type = other DNA
gcaggtgcctcgggtct

SEQ ID NO: 183392 - DNA, 17 bp, synthetic construct
  source 1..17: mol_type = other DNA
ggcaggtgcctcgggtc

SEQ ID NO: 183393 - DNA, 17 bp, synthetic construct
  source 1..17: mol_type = other DNA
gggcaggtgcctcgggt

SEQ ID NO: 183394 - DNA, 17 bp, synthetic construct
  source 1..17: mol_type = other DNA
ggggcaggtgcctcggg

SEQ ID NO: 183395 - DNA, 17 bp, synthetic construct
  source 1..17: mol_type = other DNA
gggggcaggtgcctcgg

SEQ ID NO: 183396 - DNA, 17 bp, synthetic construct
  source 1..17: mol_type = other DNA
tgggggcaggtgcctcg

SEQ ID NO: 183397 - DNA, 17 bp, synthetic construct
  source 1..17: mol_type = other DNA
ctgggggcaggtgcctc

SEQ ID NO: 183398 - DNA, 17 bp, synthetic construct
  source 1..17: mol_type = other DNA
cctgggggcaggtgcct

SEQ ID NO: 183399 - DNA, 17 bp, synthetic construct
  source 1..17: mol_type = other DNA
acctgggggcaggtgcc

SEQ ID NO: 183400 - DNA, 17 bp, synthetic construct
  source 1..17: mol_type = other DNA
cacctgggggcaggtgc

SEQ ID NO: 183401 - DNA, 17 bp, synthetic construct
  source 1..17: mol_type = other DNA
tcacctgggggcaggtg

SEQ ID NO: 183402 - DNA, 17 bp, synthetic construct
  source 1..17: mol_type = other DNA
ctcacctgggggcaggt

SEQ ID NO: 183403 - DNA, 17 bp, synthetic construct
  source 1..17: mol_type = other DNA
tctcacctgggggcagg

SEQ ID NO: 183404 - DNA, 17 bp, synthetic construct
  source 1..17: mol_type = other DNA
gtctcacctgggggcag

SEQ ID NO: 183405 - DNA, 17 bp, synthetic construct
  source 1..17: mol_type = other DNA
ggtctcacctgggggca

SEQ ID NO: 183406 - DNA, 17 bp, synthetic construct
  source 1..17: mol_type = other DNA
aggtctcacctgggggc

SEQ ID NO: 183407 - DNA, 17 bp, synthetic construct
  source 1..17: mol_type = other DNA
caggtctcacctggggg

SEQ ID NO: 183408 - DNA, 17 bp, synthetic construct
  source 1..17: mol_type = other DNA
tcaggtctcacctgggg

SEQ ID NO: 183409 - DNA, 17 bp, synthetic construct
  source 1..17: mol_type = other DNA
ctcaggtctcacctggg

SEQ ID NO: 183410 - DNA, 17 bp, synthetic construct
  source 1..17: mol_type = other DNA
actcaggtctcacctgg

SEQ ID NO: 183411 - DNA, 17 bp, synthetic construct
  source 1..17: mol_type = other DNA
gactcaggtctcacctg

SEQ ID NO: 183412 - DNA, 17 bp, synthetic construct
  source 1..17: mol_type = other DNA
tgactcaggtctcacct

SEQ ID NO: 183413 - DNA, 17 bp, synthetic construct
  source 1..17: mol_type = other DNA
gtgactcaggtctcacc

SEQ ID NO: 183414 - DNA, 17 bp, synthetic construct
  source 1..17: mol_type = other DNA
ggtgactcaggtctcac

SEQ ID NO: 183415 - DNA, 17 bp, synthetic construct
  source 1..17: mol_type = other DNA
gggtgactcaggtctca

SEQ ID NO: 183416 - DNA, 17 bp, synthetic construct
  source 1..17: mol_type = other DNA
cgggtgactcaggtctc

SEQ ID NO: 183417 - DNA, 17 bp, synthetic construct
  source 1..17: mol_type = other DNA
gcgggtgactcaggtct

SEQ ID NO: 183418 - DNA, 17 bp, synthetic construct
  source 1..17: mol_type = other DNA
ggcgggtgactcaggtc

SEQ ID NO: 183419 - DNA, 17 bp, synthetic construct
  source 1..17: mol_type = other DNA
gggcgggtgactcaggt

SEQ ID NO: 183420 - DNA, 17 bp, synthetic construct
  source 1..17: mol_type = other DNA
ggggcgggtgactcagg

SEQ ID NO: 183421 - DNA, 17 bp, synthetic construct
  source 1..17: mol_type = other DNA
gggggcgggtgactcag

SEQ ID NO: 183422 - DNA, 17 bp, synthetic construct
  source 1..17: mol_type = other DNA
tgggggcgggtgactca

SEQ ID NO: 183423 - DNA, 17 bp, synthetic construct
  source 1..17: mol_type = other DNA
ctgggggcgggtgactc

SEQ ID NO: 183424 - DNA, 17 bp, synthetic construct
  source 1..17: mol_type = other DNA
cctgggggcgggtgact

SEQ ID NO: 183425 - DNA, 17 bp, synthetic construct
  source 1..17: mol_type = other DNA
acctgggggcgggtgac

SEQ ID NO: 183426 - DNA, 17 bp, synthetic construct
  source 1..17: mol_type = other DNA
cacctgggggcgggtga

SEQ ID NO: 183427 - DNA, 17 bp, synthetic construct
  source 1..17: mol_type = other DNA
tcacctgggggcgggtg

SEQ ID NO: 183428 - DNA, 17 bp, synthetic construct
  source 1..17: mol_type = other DNA
ctcacctgggggcgggt

SEQ ID NO: 183429 - DNA, 17 bp, synthetic construct
  source 1..17: mol_type = other DNA
gctcacctgggggcggg

SEQ ID NO: 183430 - DNA, 17 bp, synthetic construct
  source 1..17: mol_type = other DNA
ggctcacctgggggcgg

SEQ ID NO: 183431 - DNA, 17 bp, synthetic construct
  source 1..17: mol_type = other DNA
gggctcacctgggggcg

SEQ ID NO: 183432 - DNA, 17 bp, synthetic construct
  source 1..17: mol_type = other DNA
ggggctcacctgggggc

SEQ ID NO: 183433 - DNA, 17 bp, synthetic construct
  source 1..17: mol_type = other DNA
gggggctcacctggggg

SEQ ID NO: 183434 - DNA, 17 bp, synthetic construct
  source 1..17: mol_type = other DNA
cgggggctcacctgggg

SEQ ID NO: 183435 - DNA, 17 bp, synthetic construct
  source 1..17: mol_type = other DNA
tcgggggctcacctggg

SEQ ID NO: 183436 - DNA, 17 bp, synthetic construct
  source 1..17: mol_type = other DNA
ctcgggggctcacctgg

SEQ ID NO: 183437 - DNA, 17 bp, synthetic construct
  source 1..17: mol_type = other DNA
cctcgggggctcacctg

SEQ ID NO: 183438 - DNA, 17 bp, synthetic construct
  source 1..17: mol_type = other DNA
gcctcgggggctcacct

SEQ ID NO: 183439 - DNA, 17 bp, synthetic construct
  source 1..17: mol_type = other DNA
tgcctcgggggctcacc

SEQ ID NO: 183440 - DNA, 17 bp, synthetic construct
  source 1..17: mol_type = other DNA
gtgcctcgggggctcac

SEQ ID NO: 183441 - DNA, 17 bp, synthetic construct
  source 1..17: mol_type = other DNA
ggtgcctcgggggctca

SEQ ID NO: 183442 - DNA, 17 bp, synthetic construct
  source 1..17: mol_type = other DNA
aggtgcctcgggggctc

SEQ ID NO: 183443 - DNA, 17 bp, synthetic construct
  source 1..17: mol_type = other DNA
caggtgcctcgggggct

SEQ ID NO: 183444 - DNA, 17 bp, synthetic construct
  source 1..17: mol_type = other DNA
gcaggtgcctcgggggc

SEQ ID NO: 183445 - DNA, 17 bp, synthetic construct
  source 1..17: mol_type = other DNA
ggcaggtgcctcggggg

SEQ ID NO: 183446 - DNA, 17 bp, synthetic construct
  source 1..17: mol_type = other DNA
gggcaggtgcctcgggg

SEQ ID NO: 183447 - DNA, 17 bp, synthetic construct
  source 1..17: mol_type = other DNA
ggggcaggtgcctcggg

SEQ ID NO: 183448 - DNA, 17 bp, synthetic construct
  source 1..17: mol_type = other DNA
gggggcaggtgcctcgg

SEQ ID NO: 183449 - DNA, 17 bp, synthetic construct
  source 1..17: mol_type = other DNA
tgggggcaggtgcctcg

SEQ ID NO: 183450 - DNA, 17 bp, synthetic construct
  source 1..17: mol_type = other DNA
ctgggggcaggtgcctc

SEQ ID NO: 183451 - DNA, 17 bp, synthetic construct
  source 1..17: mol_type = other DNA
cctgggggcaggtgcct

SEQ ID NO: 183452 - DNA, 17 bp, synthetic construct
  source 1..17: mol_type = other DNA
acctgggggcaggtgcc

SEQ ID NO: 183453 - DNA, 17 bp, synthetic construct
  source 1..17: mol_type = other DNA
cacctgggggcaggtgc

SEQ ID NO: 183454 - DNA, 17 bp, synthetic construct
  source 1..17: mol_type = other DNA
tcacctgggggcaggtg

SEQ ID NO: 183455 - DNA, 17 bp, synthetic construct
  source 1..17: mol_type = other DNA
ctcacctgggggcaggt

SEQ ID NO: 183456 - DNA, 17 bp, synthetic construct
  source 1..17: mol_type = other DNA
actcacctgggggcagg

SEQ ID NO: 183457 - DNA, 17 bp, synthetic construct
  source 1..17: mol_type = other DNA
gactcacctgggggcag

SEQ ID NO: 183458 - DNA, 17 bp, synthetic construct
  source 1..17: mol_type = other DNA
ggactcacctgggggca

SEQ ID NO: 183459 - DNA, 17 bp, synthetic construct
  source 1..17: mol_type = other DNA
gggactcacctgggggc

SEQ ID NO: 183460 - DNA, 17 bp, synthetic construct
  source 1..17: mol_type = other DNA
agggactcacctggggg

SEQ ID NO: 183461 - DNA, 17 bp, synthetic construct
  source 1..17: mol_type = other DNA
cagggactcacctgggg

SEQ ID NO: 183462 - DNA, 17 bp, synthetic construct
  source 1..17: mol_type = other DNA
tcagggactcacctggg

SEQ ID NO: 183463 - DNA, 17 bp, synthetic construct
  source 1..17: mol_type = other DNA
ctcagggactcacctgg

SEQ ID NO: 183464 - DNA, 17 bp, synthetic construct
  source 1..17: mol_type = other DNA
cctcagggactcacctg

SEQ ID NO: 183465 - DNA, 17 bp, synthetic construct
  source 1..17: mol_type = other DNA
gcctcagggactcacct

SEQ ID NO: 183466 - DNA, 17 bp, synthetic construct
  source 1..17: mol_type = other DNA
tgcctcagggactcacc

SEQ ID NO: 183467 - DNA, 17 bp, synthetic construct
  source 1..17: mol_type = other DNA
gtgcctcagggactcac

SEQ ID NO: 183468 - DNA, 17 bp, synthetic construct
  source 1..17: mol_type = other DNA
agtgcctcagggactca

SEQ ID NO: 183469 - DNA, 17 bp, synthetic construct
  source 1..17: mol_type = other DNA
aagtgcctcagggactc

SEQ ID NO: 183470 - DNA, 17 bp, synthetic construct
  source 1..17: mol_type = other DNA
caagtgcctcagggact

SEQ ID NO: 183471 - DNA, 17 bp, synthetic construct
  source 1..17: mol_type = other DNA
gcaagtgcctcagggac

SEQ ID NO: 183472 - DNA, 17 bp, synthetic construct
  source 1..17: mol_type = other DNA
ggcaagtgcctcaggga

SEQ ID NO: 183473 - DNA, 17 bp, synthetic construct
  source 1..17: mol_type = other DNA
gggcaagtgcctcaggg

SEQ ID NO: 183474 - DNA, 17 bp, synthetic construct
  source 1..17: mol_type = other DNA
ggggcaagtgcctcagg

SEQ ID NO: 183475 - DNA, 17 bp, synthetic construct
  source 1..17: mol_type = other DNA
gggggcaagtgcctcag

SEQ ID NO: 183476 - DNA, 17 bp, synthetic construct
  source 1..17: mol_type = other DNA
tgggggcaagtgcctca

SEQ ID NO: 183477 - DNA, 17 bp, synthetic construct
  source 1..17: mol_type = other DNA
ttgggggcaagtgcctc

SEQ ID NO: 183478 - DNA, 17 bp, synthetic construct
  source 1..17: mol_type = other DNA
cttgggggcaagtgcct

SEQ ID NO: 183479 - DNA, 17 bp, synthetic construct
  source 1..17: mol_type = other DNA
acttgggggcaagtgcc

SEQ ID NO: 183480 - DNA, 17 bp, synthetic construct
  source 1..17: mol_type = other DNA
cacttgggggcaagtgc

SEQ ID NO: 183481 - DNA, 17 bp, synthetic construct
  source 1..17: mol_type = other DNA
tcacttgggggcaagtg

SEQ ID NO: 183482 - DNA, 17 bp, synthetic construct
  source 1..17: mol_type = other DNA
ctcacttgggggcaagt

SEQ ID NO: 183483 - DNA, 17 bp, synthetic construct
  source 1..17: mol_type = other DNA
tctcacttgggggcaag

SEQ ID NO: 183484 - DNA, 17 bp, synthetic construct
  source 1..17: mol_type = other DNA
gtctcacttgggggcaa

SEQ ID NO: 183485 - DNA, 17 bp, synthetic construct
  source 1..17: mol_type = other DNA
ggtctcacttgggggca

SEQ ID NO: 183486 - DNA, 17 bp, synthetic construct
  source 1..17: mol_type = other DNA
gggtctcacttgggggc

SEQ ID NO: 183487 - DNA, 17 bp, synthetic construct
  source 1..17: mol_type = other DNA
cgggtctcacttggggg

SEQ ID NO: 183488 - DNA, 17 bp, synthetic construct
  source 1..17: mol_type = other DNA
tcgggtctcacttgggg

SEQ ID NO: 183489 - DNA, 17 bp, synthetic construct
  source 1..17: mol_type = other DNA
ctcgggtctcacttggg

SEQ ID NO: 183490 - DNA, 17 bp, synthetic construct
  source 1..17: mol_type = other DNA
cctcgggtctcacttgg

SEQ ID NO: 183491 - DNA, 17 bp, synthetic construct
  source 1..17: mol_type = other DNA
gcctcgggtctcacttg

SEQ ID NO: 183492 - DNA, 17 bp, synthetic construct
  source 1..17: mol_type = other DNA
tgcctcgggtctcactt

SEQ ID NO: 183493 - DNA, 17 bp, synthetic construct
  source 1..17: mol_type = other DNA
gtgcctcgggtctcact

SEQ ID NO: 183494 - DNA, 17 bp, synthetic construct
  source 1..17: mol_type = other DNA
ggtgcctcgggtctcac

SEQ ID NO: 183495 - DNA, 17 bp, synthetic construct
  source 1..17: mol_type = other DNA
aggtgcctcgggtctca

SEQ ID NO: 183496 - DNA, 17 bp, synthetic construct
  source 1..17: mol_type = other DNA
caggtgcctcgggtctc

SEQ ID NO: 183497 - DNA, 17 bp, synthetic construct
  source 1..17: mol_type = other DNA
gcaggtgcctcgggtct

SEQ ID NO: 183498 - DNA, 17 bp, synthetic construct
  source 1..17: mol_type = other DNA
ggcaggtgcctcgggtc

SEQ ID NO: 183499 - DNA, 17 bp, synthetic construct
  source 1..17: mol_type = other DNA
gggcaggtgcctcgggt

SEQ ID NO: 183500 - DNA, 17 bp, synthetic construct
  source 1..17: mol_type = other DNA
ggggcaggtgcctcggg

SEQ ID NO: 183501 - DNA, 17 bp, synthetic construct
  source 1..17: mol_type = other DNA
gggggcaggtgcctcgg

SEQ ID NO: 183502 - DNA, 17 bp, synthetic construct
  source 1..17: mol_type = other DNA
tgggggcaggtgcctcg

SEQ ID NO: 183503 - DNA, 17 bp, synthetic construct
  source 1..17: mol_type = other DNA
ctgggggcaggtgcctc

SEQ ID NO: 183504 - DNA, 17 bp, synthetic construct
  source 1..17: mol_type = other DNA
cctgggggcaggtgcct

SEQ ID NO: 183505 - DNA, 17 bp, synthetic construct
  source 1..17: mol_type = other DNA
acctgggggcaggtgcc

SEQ ID NO: 183506 - DNA, 17 bp, synthetic construct
  source 1..17: mol_type = other DNA
cacctgggggcaggtgc

SEQ ID NO: 183507 - DNA, 17 bp, synthetic construct
  source 1..17: mol_type = other DNA
tcacctgggggcaggtg

SEQ ID NO: 183508 - DNA, 17 bp, synthetic construct
  source 1..17: mol_type = other DNA
ctcacctgggggcaggt

SEQ ID NO: 183509 - DNA, 17 bp, synthetic construct
  source 1..17: mol_type = other DNA
tctcacctgggggcagg

SEQ ID NO: 183510 - DNA, 17 bp, synthetic construct
  source 1..17: mol_type = other DNA
gtctcacctgggggcag

SEQ ID NO: 183511 - DNA, 17 bp, synthetic construct
  source 1..17: mol_type = other DNA
ggtctcacctgggggca

SEQ ID NO: 183512 - DNA, 17 bp, synthetic construct
  source 1..17: mol_type = other DNA
gggtctcacctgggggc

SEQ ID NO: 183513 - DNA, 17 bp, synthetic construct
  source 1..17: mol_type = other DNA
cgggtctcacctggggg

SEQ ID NO: 183514 - DNA, 17 bp, synthetic construct
  source 1..17: mol_type = other DNA
tcgggtctcacctgggg

SEQ ID NO: 183515 - DNA, 17 bp, synthetic construct
  source 1..17: mol_type = other DNA
ctcgggtctcacctggg

SEQ ID NO: 183516 - DNA, 17 bp, synthetic construct
  source 1..17: mol_type = other DNA
cctcgggtctcacctgg

SEQ ID NO: 183517 - DNA, 17 bp, synthetic construct
  source 1..17: mol_type = other DNA
gcctcgggtctcacctg

SEQ ID NO: 183518 - DNA, 17 bp, synthetic construct
  source 1..17: mol_type = other DNA
tgcctcgggtctcacct

SEQ ID NO: 183519 - DNA, 17 bp, synthetic construct
  source 1..17: mol_type = other DNA
gtgcctcgggtctcacc

SEQ ID NO: 183520 - DNA, 17 bp, synthetic construct
  source 1..17: mol_type = other DNA
ggtgcctcgggtctcac

SEQ ID NO: 183521 - DNA, 17 bp, synthetic construct
  source 1..17: mol_type = other DNA
aggtgcctcgggtctca

SEQ ID NO: 183522 - DNA, 17 bp, synthetic construct
  source 1..17: mol_type = other DNA
caggtgcctcgggtctc

SEQ ID NO: 183523 - DNA, 17 bp, synthetic construct
  source 1..17: mol_type = other DNA
gcaggtgcctcgggtct

SEQ ID NO: 183524 - DNA, 17 bp, synthetic construct
  source 1..17: mol_type = other DNA
ggcaggtgcctcgggtc

SEQ ID NO: 183525 - DNA, 17 bp, synthetic construct
  source 1..17: mol_type = other DNA
gggcaggtgcctcgggt

SEQ ID NO: 183526 - DNA, 17 bp, synthetic construct
  source 1..17: mol_type = other DNA
ggggcaggtgcctcggg

SEQ ID NO: 183527 - DNA, 17 bp, synthetic construct
  source 1..17: mol_type = other DNA
gggggcaggtgcctcgg

SEQ ID NO: 183528 - DNA, 17 bp, synthetic construct
  source 1..17: mol_type = other DNA
tgggggcaggtgcctcg

SEQ ID NO: 183529 - DNA, 17 bp, synthetic construct
  source 1..17: mol_type = other DNA
ctgggggcaggtgcctc

SEQ ID NO: 183530 - DNA, 17 bp, synthetic construct
  source 1..17: mol_type = other DNA
cctgggggcaggtgcct

SEQ ID NO: 183531 - DNA, 17 bp, synthetic construct
  source 1..17: mol_type = other DNA
acctgggggcaggtgcc

SEQ ID NO: 183532 - DNA, 17 bp, synthetic construct
  source 1..17: mol_type = other DNA
cacctgggggcaggtgc

SEQ ID NO: 183533 - DNA, 17 bp, synthetic construct
  source 1..17: mol_type = other DNA
tcacctgggggcaggtg

SEQ ID NO: 183534 - DNA, 17 bp, synthetic construct
  source 1..17: mol_type = other DNA
ctcacctgggggcaggt

SEQ ID NO: 183535 - DNA, 17 bp, synthetic construct
  source 1..17: mol_type = other DNA
tctcacctgggggcagg

SEQ ID NO: 183536 - DNA, 17 bp, synthetic construct
  source 1..17: mol_type = other DNA
gtctcacctgggggcag

SEQ ID NO: 183537 - DNA, 17 bp, synthetic construct
  source 1..17: mol_type = other DNA
ggtctcacctgggggca

SEQ ID NO: 183538 - DNA, 17 bp, synthetic construct
  source 1..17: mol_type = other DNA
aggtctcacctgggggc

SEQ ID NO: 183539 - DNA, 17 bp, synthetic construct
  source 1..17: mol_type = other DNA
caggtctcacctggggg

SEQ ID NO: 183540 - DNA, 17 bp, synthetic construct
  source 1..17: mol_type = other DNA
tcaggtctcacctgggg

SEQ ID NO: 183541 - DNA, 17 bp, synthetic construct
  source 1..17: mol_type = other DNA
ctcaggtctcacctggg

SEQ ID NO: 183542 - DNA, 17 bp, synthetic construct
  source 1..17: mol_type = other DNA
actcaggtctcacctgg

SEQ ID NO: 183543 - DNA, 17 bp, synthetic construct
  source 1..17: mol_type = other DNA
gactcaggtctcacctg

SEQ ID NO: 183544 - DNA, 17 bp, synthetic construct
  source 1..17: mol_type = other DNA
tgactcaggtctcacct

SEQ ID NO: 183545 - DNA, 17 bp, synthetic construct
  source 1..17: mol_type = other DNA
gtgactcaggtctcacc

SEQ ID NO: 183546 - DNA, 17 bp, synthetic construct
  source 1..17: mol_type = other DNA
ggtgactcaggtctcac

SEQ ID NO: 183547 - DNA, 17 bp, synthetic construct
  source 1..17: mol_type = other DNA
aggtgactcaggtctca

SEQ ID NO: 183548 - DNA, 17 bp, synthetic construct
  source 1..17: mol_type = other DNA
caggtgactcaggtctc

SEQ ID NO: 183549 - DNA, 17 bp, synthetic construct
  source 1..17: mol_type = other DNA
gcaggtgactcaggtct

SEQ ID NO: 183550 - DNA, 17 bp, synthetic construct
  source 1..17: mol_type = other DNA
ggcaggtgactcaggtc

SEQ ID NO: 183551 - DNA, 17 bp, synthetic construct
  source 1..17: mol_type = other DNA
gggcaggtgactcaggt

SEQ ID NO: 183552 - DNA, 17 bp, synthetic construct
  source 1..17: mol_type = other DNA
ggggcaggtgactcagg

SEQ ID NO: 183553 - DNA, 17 bp, synthetic construct
  source 1..17: mol_type = other DNA
gggggcaggtgactcag

SEQ ID NO: 183554 - DNA, 17 bp, synthetic construct
  source 1..17: mol_type = other DNA
tgggggcaggtgactca

SEQ ID NO: 183555 - DNA, 17 bp, synthetic construct
  source 1..17: mol_type = other DNA
ctgggggcaggtgactc

SEQ ID NO: 183556 - DNA, 17 bp, synthetic construct
  source 1..17: mol_type = other DNA
cctgggggcaggtgact

SEQ ID NO: 183557 - DNA, 17 bp, synthetic construct
  source 1..17: mol_type = other DNA
acctgggggcaggtgac

SEQ ID NO: 183558 - DNA, 17 bp, synthetic construct
  source 1..17: mol_type = other DNA
cacctgggggcaggtga

SEQ ID NO: 183559 - DNA, 17 bp, synthetic construct
  source 1..17: mol_type = other DNA
tcacctgggggcaggtg

SEQ ID NO: 183560 - DNA, 17 bp, synthetic construct
  source 1..17: mol_type = other DNA
ctcacctgggggcaggt

SEQ ID NO: 183561 - DNA, 17 bp, synthetic construct
  source 1..17: mol_type = other DNA
gctcacctgggggcagg

SEQ ID NO: 183562 - DNA, 17 bp, synthetic construct
  source 1..17: mol_type = other DNA
ggctcacctgggggcag

SEQ ID NO: 183563 - DNA, 17 bp, synthetic construct
  source 1..17: mol_type = other DNA
tggctcacctgggggca

SEQ ID NO: 183564 - DNA, 17 bp, synthetic construct
  source 1..17: mol_type = other DNA
gtggctcacctgggggc

SEQ ID NO: 183565 - DNA, 17 bp, synthetic construct
  source 1..17: mol_type = other DNA
ggtggctcacctggggg

SEQ ID NO: 183566 - DNA, 17 bp, synthetic construct
  source 1..17: mol_type = other DNA
tggtggctcacctgggg

SEQ ID NO: 183567 - DNA, 17 bp, synthetic construct
  source 1..17: mol_type = other DNA
ttggtggctcacctggg

SEQ ID NO: 183568 - DNA, 17 bp, synthetic construct
  source 1..17: mol_type = other DNA
cttggtggctcacctgg

SEQ ID NO: 183569 - DNA, 17 bp, synthetic construct
  source 1..17: mol_type = other DNA
ccttggtggctcacctg

SEQ ID NO: 183570 - DNA, 17 bp, synthetic construct
  source 1..17: mol_type = other DNA
gccttggtggctcacct

SEQ ID NO: 183571 - DNA, 17 bp, synthetic construct
  source 1..17: mol_type = other DNA
tgccttggtggctcacc

SEQ ID NO: 183572 - DNA, 17 bp, synthetic construct
  source 1..17: mol_type = other DNA
gtgccttggtggctcac

SEQ ID NO: 183573 - DNA, 17 bp, synthetic construct
  source 1..17: mol_type = other DNA
ggtgccttggtggctca

SEQ ID NO: 183574 - DNA, 17 bp, synthetic construct
  source 1..17: mol_type = other DNA
aggtgccttggtggctc

SEQ ID NO: 183575 - DNA, 17 bp, synthetic construct
  source 1..17: mol_type = other DNA
caggtgccttggtggct

SEQ ID NO: 183576 - DNA, 17 bp, synthetic construct
  source 1..17: mol_type = other DNA
gcaggtgccttggtggc

SEQ ID NO: 183577 - DNA, 17 bp, synthetic construct
  source 1..17: mol_type = other DNA
ggcaggtgccttggtgg

SEQ ID NO: 183578 - DNA, 17 bp, synthetic construct
  source 1..17: mol_type = other DNA
gggcaggtgccttggtg

SEQ ID NO: 183579 - DNA, 17 bp, synthetic construct
  source 1..17: mol_type = other DNA
ggggcaggtgccttggt

SEQ ID NO: 183580 - DNA, 17 bp, synthetic construct
  source 1..17: mol_type = other DNA
gggggcaggtgccttgg

SEQ ID NO: 183581 - DNA, 17 bp, synthetic construct
  source 1..17: mol_type = other DNA
tgggggcaggtgccttg

SEQ ID NO: 183582 - DNA, 17 bp, synthetic construct
  source 1..17: mol_type = other DNA
ttgggggcaggtgcctt

SEQ ID NO: 183583 - DNA, 17 bp, synthetic construct
  source 1..17: mol_type = other DNA
cttgggggcaggtgcct

SEQ ID NO: 183584 - DNA, 17 bp, synthetic construct
  source 1..17: mol_type = other DNA
acttgggggcaggtgcc

SEQ ID NO: 183585 - DNA, 17 bp, synthetic construct
  source 1..17: mol_type = other DNA
cacttgggggcaggtgc

SEQ ID NO: 183586 - DNA, 17 bp, synthetic construct
  source 1..17: mol_type = other DNA
tcacttgggggcaggtg

SEQ ID NO: 183587 - DNA, 17 bp, synthetic construct
  source 1..17: mol_type = other DNA
ctcacttgggggcaggt

SEQ ID NO: 183588 - DNA, 17 bp, synthetic construct
  source 1..17: mol_type = other DNA
tctcacttgggggcagg

SEQ ID NO: 183589 - DNA, 17 bp, synthetic construct
  source 1..17: mol_type = other DNA
gtctcacttgggggcag

SEQ ID NO: 183590 - DNA, 17 bp, synthetic construct
  source 1..17: mol_type = other DNA
ggtctcacttgggggca

SEQ ID NO: 183591 - DNA, 17 bp, synthetic construct
  source 1..17: mol_type = other DNA
gggtctcacttgggggc

SEQ ID NO: 183592 - DNA, 17 bp, synthetic construct
  source 1..17: mol_type = other DNA
cgggtctcacttggggg

SEQ ID NO: 183593 - DNA, 17 bp, synthetic construct
  source 1..17: mol_type = other DNA
tcgggtctcacttgggg

SEQ ID NO: 183594 - DNA, 17 bp, synthetic construct
  source 1..17: mol_type = other DNA
ctcgggtctcacttggg

SEQ ID NO: 183595 - DNA, 17 bp, synthetic construct
  source 1..17: mol_type = other DNA
cctcgggtctcacttgg

SEQ ID NO: 183596 - DNA, 17 bp, synthetic construct
  source 1..17: mol_type = other DNA
gcctcgggtctcacttg

SEQ ID NO: 183597 - DNA, 17 bp, synthetic construct
  source 1..17: mol_type = other DNA
tgcctcgggtctcactt

SEQ ID NO: 183598 - DNA, 17 bp, synthetic construct
  source 1..17: mol_type = other DNA
gtgcctcgggtctcact

SEQ ID NO: 183599 - DNA, 17 bp, synthetic construct
  source 1..17: mol_type = other DNA
ggtgcctcgggtctcac

SEQ ID NO: 183600 - DNA, 17 bp, synthetic construct
  source 1..17: mol_type = other DNA
aggtgcctcgggtctca

SEQ ID NO: 183601 - DNA, 17 bp, synthetic construct
  source 1..17: mol_type = other DNA
caggtgcctcgggtctc

SEQ ID NO: 183602 - DNA, 17 bp, synthetic construct
  source 1..17: mol_type = other DNA
gcaggtgcctcgggtct

SEQ ID NO: 183603 - DNA, 17 bp, synthetic construct
  source 1..17: mol_type = other DNA
ggcaggtgcctcgggtc

SEQ ID NO: 183604 - DNA, 17 bp, synthetic construct
  source 1..17: mol_type = other DNA
gggcaggtgcctcgggt

SEQ ID NO: 183605 - DNA, 17 bp, synthetic construct
  source 1..17: mol_type = other DNA
ggggcaggtgcctcggg

SEQ ID NO: 183606 - DNA, 17 bp, synthetic construct
  source 1..17: mol_type = other DNA
gggggcaggtgcctcgg

SEQ ID NO: 183607 - DNA, 17 bp, synthetic construct
  source 1..17: mol_type = other DNA
tgggggcaggtgcctcg

SEQ ID NO: 183608 - DNA, 17 bp, synthetic construct
  source 1..17: mol_type = other DNA
ctgggggcaggtgcctc

SEQ ID NO: 183609 - DNA, 17 bp, synthetic construct
  source 1..17: mol_type = other DNA
cctgggggcaggtgcct

SEQ ID NO: 183610 - DNA, 17 bp, synthetic construct
  source 1..17: mol_type = other DNA
acctgggggcaggtgcc

SEQ ID NO: 183611 - DNA, 17 bp, synthetic construct
  source 1..17: mol_type = other DNA
cacctgggggcaggtgc

SEQ ID NO: 183612 - DNA, 17 bp, synthetic construct
  source 1..17: mol_type = other DNA
tcacctgggggcaggtg

SEQ ID NO: 183613 - DNA, 17 bp, synthetic construct
  source 1..17: mol_type = other DNA
ctcacctgggggcaggt

SEQ ID NO: 183614 - DNA, 17 bp, synthetic construct
  source 1..17: mol_type = other DNA
gctcacctgggggcagg

SEQ ID NO: 183615 - DNA, 17 bp, synthetic construct
  source 1..17: mol_type = other DNA
ggctcacctgggggcag

SEQ ID NO: 183616 - DNA, 17 bp, synthetic construct
  source 1..17: mol_type = other DNA
gggctcacctgggggca

SEQ ID NO: 183617 - DNA, 17 bp, synthetic construct
  source 1..17: mol_type = other DNA
tgggctcacctgggggc

SEQ ID NO: 183618 - DNA, 17 bp, synthetic construct
  source 1..17: mol_type = other DNA
gtgggctcacctggggg

SEQ ID NO: 183619 - DNA, 17 bp, synthetic construct
  source 1..17: mol_type = other DNA
tgtgggctcacctgggg

SEQ ID NO: 183620 - DNA, 17 bp, synthetic construct
  source 1..17: mol_type = other DNA
ctgtgggctcacctggg

SEQ ID NO: 183621 - DNA, 17 bp, synthetic construct
  source 1..17: mol_type = other DNA
gctgtgggctcacctgg

SEQ ID NO: 183622 - DNA, 17 bp, synthetic construct
  source 1..17: mol_type = other DNA
agctgtgggctcacctg

SEQ ID NO: 183623 - DNA, 17 bp, synthetic construct
  source 1..17: mol_type = other DNA
cagctgtgggctcacct

SEQ ID NO: 183624 - DNA, 17 bp, synthetic construct
  source 1..17: mol_type = other DNA
gcagctgtgggctcacc

SEQ ID NO: 183625 - DNA, 17 bp, synthetic construct
  source 1..17: mol_type = other DNA
agcagctgtgggctcac

SEQ ID NO: 183626 - DNA, 17 bp, synthetic construct
  source 1..17: mol_type = other DNA
cagcagctgtgggctca

SEQ ID NO: 183627 - DNA, 17 bp, synthetic construct
  source 1..17: mol_type = other DNA
ccagcagctgtgggctc

SEQ ID NO: 183628 - DNA, 17 bp, synthetic construct
  source 1..17: mol_type = other DNA
cccagcagctgtgggct

SEQ ID NO: 183629 - DNA, 17 bp, synthetic construct
  source 1..17: mol_type = other DNA
gcccagcagctgtgggc

SEQ ID NO: 183630 - DNA, 17 bp, synthetic construct
  source 1..17: mol_type = other DNA
tgcccagcagctgtggg

SEQ ID NO: 183631 - DNA, 17 bp, synthetic construct
  source 1..17: mol_type = other DNA
ctgcccagcagctgtgg

SEQ ID NO: 183632 - DNA, 17 bp, synthetic construct
  source 1..17: mol_type = other DNA
tctgcccagcagctgtg

SEQ ID NO: 183633 - DNA, 17 bp, synthetic construct
  source 1..17: mol_type = other DNA
gtctgcccagcagctgt

SEQ ID NO: 183634 - DNA, 17 bp, synthetic construct
  source 1..17: mol_type = other DNA
ggtctgcccagcagctg

SEQ ID NO: 183635 - DNA, 17 bp, synthetic construct
  source 1..17: mol_type = other DNA
gggtctgcccagcagct

SEQ ID NO: 183636 - DNA, 17 bp, synthetic construct
  source 1..17: mol_type = other DNA
tgggtctgcccagcagc

SEQ ID NO: 183637 - DNA, 17 bp, synthetic construct
  source 1..17: mol_type = other DNA
ctgggtctgcccagcag

SEQ ID NO: 183638 - DNA, 17 bp, synthetic construct
  source 1..17: mol_type = other DNA
gctgggtctgcccagca

SEQ ID NO: 183639 - DNA, 17 bp, synthetic construct
  source 1..17: mol_type = other DNA
ggctgggtctgcccagc

SEQ ID NO: 183640 - DNA, 17 bp, synthetic construct
  source 1..17: mol_type = other DNA
gggctgggtctgcccag

SEQ ID NO: 183641 - DNA, 17 bp, synthetic construct
  source 1..17: mol_type = other DNA
agggctgggtctgccca

SEQ ID NO: 183642 - DNA, 17 bp, synthetic construct
  source 1..17: mol_type = other DNA
cagggctgggtctgccc

SEQ ID NO: 183643 - DNA, 17 bp, synthetic construct
  source 1..17: mol_type = other DNA
tcagggctgggtctgcc

SEQ ID NO: 183644 - DNA, 17 bp, synthetic construct
  source 1..17: mol_type = other DNA
ctcagggctgggtctgc

SEQ ID NO: 183645 - DNA, 17 bp, synthetic construct
  source 1..17: mol_type = other DNA
actcagggctgggtctg

SEQ ID NO: 183646 - DNA, 17 bp, synthetic construct
  source 1..17: mol_type = other DNA
gactcagggctgggtct

SEQ ID NO: 183647 - DNA, 17 bp, synthetic construct
  source 1..17: mol_type = other DNA
tgactcagggctgggtc

SEQ ID NO: 183648 - DNA, 17 bp, synthetic construct
  source 1..17: mol_type = other DNA
gtgactcagggctgggt

SEQ ID NO: 183649 - DNA, 17 bp, synthetic construct
  source 1..17: mol_type = other DNA
agtgactcagggctggg

SEQ ID NO: 183650 - DNA, 17 bp, synthetic construct
  source 1..17: mol_type = other DNA
aagtgactcagggctgg

SEQ ID NO: 183651 - DNA, 17 bp, synthetic construct
  source 1..17: mol_type = other DNA
taagtgactcagggctg

SEQ ID NO: 183652 - DNA, 17 bp, synthetic construct
  source 1..17: mol_type = other DNA
ataagtgactcagggct

SEQ ID NO: 183653 - DNA, 17 bp, synthetic construct
  source 1..17: mol_type = other DNA
gataagtgactcagggc

SEQ ID NO: 183654 - DNA, 17 bp, synthetic construct
  source 1..17: mol_type = other DNA
ggataagtgactcaggg

SEQ ID NO: 183655 - DNA, 17 bp, synthetic construct
  source 1..17: mol_type = other DNA
aggataagtgactcagg

SEQ ID NO: 183656 - DNA, 17 bp, synthetic construct
  source 1..17: mol_type = other DNA
caggataagtgactcag

SEQ ID NO: 183657 - DNA, 17 bp, synthetic construct
  source 1..17: mol_type = other DNA
ccaggataagtgactca

SEQ ID NO: 183658 - DNA, 17 bp, synthetic construct
  source 1..17: mol_type = other DNA
gccaggataagtgactc

SEQ ID NO: 183659 - DNA, 17 bp, synthetic construct
  source 1..17: mol_type = other DNA
agccaggataagtgact

SEQ ID NO: 183660 - DNA, 17 bp, synthetic construct
  source 1..17: mol_type = other DNA
gagccaggataagtgac

SEQ ID NO: 183661 - DNA, 17 bp, synthetic construct
  source 1..17: mol_type = other DNA
ggagccaggataagtga

SEQ ID NO: 183662 - DNA, 17 bp, synthetic construct
  source 1..17: mol_type = other DNA
gggagccaggataagtg

SEQ ID NO: 183663 - DNA, 17 bp, synthetic construct
  source 1..17: mol_type = other DNA
agggagccaggataagt

SEQ ID NO: 183664 - DNA, 17 bp, synthetic construct
  source 1..17: mol_type = other DNA
cagggagccaggataag

SEQ ID NO: 183665 - DNA, 17 bp, synthetic construct
  source 1..17: mol_type = other DNA
ccagggagccaggataa

SEQ ID NO: 183666 - DNA, 17 bp, synthetic construct
  source 1..17: mol_type = other DNA
cccagggagccaggata

SEQ ID NO: 183667 - DNA, 17 bp, synthetic construct
  source 1..17: mol_type = other DNA
ccccagggagccaggat

SEQ ID NO: 183668 - DNA, 17 bp, synthetic construct
  source 1..17: mol_type = other DNA
accccagggagccagga

SEQ ID NO: 183669 - DNA, 17 bp, synthetic construct
  source 1..17: mol_type = other DNA
aaccccagggagccagg

SEQ ID NO: 183670 - DNA, 17 bp, synthetic construct
  source 1..17: mol_type = other DNA
gaaccccagggagccag

SEQ ID NO: 183671 - DNA, 17 bp, synthetic construct
  source 1..17: mol_type = other DNA
agaaccccagggagcca

SEQ ID NO: 183672 - DNA, 17 bp, synthetic construct
  source 1..17: mol_type = other DNA
gagaaccccagggagcc

SEQ ID NO: 183673 - DNA, 17 bp, synthetic construct
  source 1..17: mol_type = other DNA
agagaaccccagggagc

SEQ ID NO: 183674 - DNA, 17 bp, synthetic construct
  source 1..17: mol_type = other DNA
tagagaaccccagggag

SEQ ID NO: 183675 - DNA, 17 bp, synthetic construct
  source 1..17: mol_type = other DNA
ctagagaaccccaggga

SEQ ID NO: 183676 - DNA, 17 bp, synthetic construct
  source 1..17: mol_type = other DNA
gctagagaaccccaggg

SEQ ID NO: 183677 - DNA, 17 bp, synthetic construct
  source 1..17: mol_type = other DNA
agctagagaaccccagg

SEQ ID NO: 183678 - DNA, 17 bp, synthetic construct
  source 1..17: mol_type = other DNA
gagctagagaaccccag

SEQ ID NO: 183679 - DNA, 17 bp, synthetic construct
  source 1..17: mol_type = other DNA
tgagctagagaacccca

SEQ ID NO: 183680 - DNA, 17 bp, synthetic construct
  source 1..17: mol_type = other DNA
ctgagctagagaacccc

SEQ ID NO: 183681 - DNA, 17 bp, synthetic construct
  source 1..17: mol_type = other DNA
gctgagctagagaaccc

SEQ ID NO: 183682 - DNA, 17 bp, synthetic construct
  source 1..17: mol_type = other DNA
ggctgagctagagaacc

SEQ ID NO: 183683 - DNA, 17 bp, synthetic construct
  source 1..17: mol_type = other DNA
tggctgagctagagaac

SEQ ID NO: 183684 - DNA, 17 bp, synthetic construct
  source 1..17: mol_type = other DNA
atggctgagctagagaa

SEQ ID NO: 183685 - DNA, 17 bp, synthetic construct
  source 1..17: mol_type = other DNA
aatggctgagctagaga

SEQ ID NO: 183686 - DNA, 17 bp, synthetic construct
  source 1..17: mol_type = other DNA
caatggctgagctagag

SEQ ID NO: 183687 - DNA, 17 bp, synthetic construct
  source 1..17: mol_type = other DNA
gcaatggctgagctaga

SEQ ID NO: 183688 - DNA, 17 bp, synthetic construct
  source 1..17: mol_type = other DNA
agcaatggctgagctag

SEQ ID NO: 183689 - DNA, 17 bp, synthetic construct
  source 1..17: mol_type = other DNA
cagcaatggctgagcta

SEQ ID NO: 183690 - DNA, 17 bp, synthetic construct
  source 1..17: mol_type = other DNA
ccagcaatggctgagct

SEQ ID NO: 183691 - DNA, 17 bp, synthetic construct
  source 1..17: mol_type = other DNA
cccagcaatggctgagc

SEQ ID NO: 183692 - DNA, 17 bp, synthetic construct
  source 1..17: mol_type = other DNA
ccccagcaatggctgag

SEQ ID NO: 183693 - DNA, 17 bp, synthetic construct
  source 1..17: mol_type = other DNA
accccagcaatggctga

SEQ ID NO: 183694 - DNA, 17 bp, synthetic construct
  source 1..17: mol_type = other DNA
gaccccagcaatggctg

SEQ ID NO: 183695 - DNA, 17 bp, synthetic construct
  source 1..17: mol_type = other DNA
agaccccagcaatggct

SEQ ID NO: 183696 - DNA, 17 bp, synthetic construct
  source 1..17: mol_type = other DNA
aagaccccagcaatggc

SEQ ID NO: 183697 - DNA, 17 bp, synthetic construct
  source 1..17: mol_type = other DNA
caagaccccagcaatgg

SEQ ID NO: 183698 - DNA, 17 bp, synthetic construct
  source 1..17: mol_type = other DNA
acaagaccccagcaatg

SEQ ID NO: 183699 - DNA, 17 bp, synthetic construct
  source 1..17: mol_type = other DNA
aacaagaccccagcaat

SEQ ID NO: 183700 - DNA, 17 bp, synthetic construct
  source 1..17: mol_type = other DNA
aaacaagaccccagcaa

SEQ ID NO: 183701 - DNA, 17 bp, synthetic construct
  source 1..17: mol_type = other DNA
caaacaagaccccagca

SEQ ID NO: 183702 - DNA, 17 bp, synthetic construct
  source 1..17: mol_type = other DNA
acaaacaagaccccagc

SEQ ID NO: 183703 - DNA, 17 bp, synthetic construct
  source 1..17: mol_type = other DNA
aacaaacaagaccccag

SEQ ID NO: 183704 - DNA, 17 bp, synthetic construct
  source 1..17: mol_type = other DNA
aaacaaacaagacccca

SEQ ID NO: 183705 - DNA, 17 bp, synthetic construct
  source 1..17: mol_type = other DNA
gaaacaaacaagacccc

SEQ ID NO: 183706 - DNA, 17 bp, synthetic construct
  source 1..17: mol_type = other DNA
ggaaacaaacaagaccc

SEQ ID NO: 183707 - DNA, 17 bp, synthetic construct
  source 1..17: mol_type = other DNA
tggaaacaaacaagacc

SEQ ID NO: 183708 - DNA, 17 bp, synthetic construct
  source 1..17: mol_type = other DNA
ttggaaacaaacaagac

SEQ ID NO: 183709 - DNA, 17 bp, synthetic construct
  source 1..17: mol_type = other DNA
tttggaaacaaacaaga

SEQ ID NO: 183710 - DNA, 17 bp, synthetic construct
  source 1..17: mol_type = other DNA
ctttggaaacaaacaag

SEQ ID NO: 183711 - DNA, 17 bp, synthetic construct
  source 1..17: mol_type = other DNA
cctttggaaacaaacaa

SEQ ID NO: 183712 - DNA, 17 bp, synthetic construct
  source 1..17: mol_type = other DNA
ccctttggaaacaaaca

SEQ ID NO: 183713 - DNA, 17 bp, synthetic construct
  source 1..17: mol_type = other DNA
tccctttggaaacaaac

SEQ ID NO: 183714 - DNA, 17 bp, synthetic construct
  source 1..17: mol_type = other DNA
ctccctttggaaacaaa

SEQ ID NO: 183715 - DNA, 17 bp, synthetic construct
  source 1..17: mol_type = other DNA
cctccctttggaaacaa

SEQ ID NO: 183716 - DNA, 17 bp, synthetic construct
  source 1..17: mol_type = other DNA
ccctccctttggaaaca

SEQ ID NO: 183717 - DNA, 17 bp, synthetic construct
  source 1..17: mol_type = other DNA
accctccctttggaaac

SEQ ID NO: 183718 - DNA, 17 bp, synthetic construct
  source 1..17: mol_type = other DNA
taccctccctttggaaa

SEQ ID NO: 183719 - DNA, 17 bp, synthetic construct
  source 1..17: mol_type = other DNA
ataccctccctttggaa

SEQ ID NO: 183720 - DNA, 17 bp, synthetic construct
  source 1..17: mol_type = other DNA
cataccctccctttgga

SEQ ID NO: 183721 - DNA, 17 bp, synthetic construct
  source 1..17: mol_type = other DNA
tcataccctccctttgg

SEQ ID NO: 183722 - DNA, 17 bp, synthetic construct
  source 1..17: mol_type = other DNA
ttcataccctccctttg

SEQ ID NO: 183723 - DNA, 17 bp, synthetic construct
  source 1..17: mol_type = other DNA
cttcataccctcccttt

SEQ ID NO: 183724 - DNA, 17 bp, synthetic construct
  source 1..17: mol_type = other DNA
acttcataccctccctt

SEQ ID NO: 183725 - DNA, 17 bp, synthetic construct
  source 1..17: mol_type = other DNA
tacttcataccctccct

SEQ ID NO: 183726 - DNA, 17 bp, synthetic construct
  source 1..17: mol_type = other DNA
ctacttcataccctccc

SEQ ID NO: 183727 - DNA, 17 bp, synthetic construct
  source 1..17: mol_type = other DNA
cctacttcataccctcc

SEQ ID NO: 183728 - DNA, 17 bp, synthetic construct
  source 1..17: mol_type = other DNA
tcctacttcataccctc

SEQ ID NO: 183729 - DNA, 17 bp, synthetic construct
  source 1..17: mol_type = other DNA
ctcctacttcataccct

SEQ ID NO: 183730 - DNA, 17 bp, synthetic construct
  source 1..17: mol_type = other DNA
cctcctacttcataccc

SEQ ID NO: 183731 - DNA, 17 bp, synthetic construct
  source 1..17: mol_type = other DNA
tcctcctacttcatacc

SEQ ID NO: 183732 - DNA, 17 bp, synthetic construct
  source 1..17: mol_type = other DNA
atcctcctacttcatac

SEQ ID NO: 183733 - DNA, 17 bp, synthetic construct
  source 1..17: mol_type = other DNA
tatcctcctacttcata

SEQ ID NO: 183734 - DNA, 17 bp, synthetic construct
  source 1..17: mol_type = other DNA
ttatcctcctacttcat

SEQ ID NO: 183735 - DNA, 17 bp, synthetic construct
  source 1..17: mol_type = other DNA
gttatcctcctacttca

SEQ ID NO: 183736 - DNA, 17 bp, synthetic construct
  source 1..17: mol_type = other DNA
agttatcctcctacttc

SEQ ID NO: 183737 - DNA, 17 bp, synthetic construct
  source 1..17: mol_type = other DNA
cagttatcctcctactt

SEQ ID NO: 183738 - DNA, 17 bp, synthetic construct
  source 1..17: mol_type = other DNA
tcagttatcctcctact

SEQ ID NO: 183739 - DNA, 17 bp, synthetic construct
  source 1..17: mol_type = other DNA
ctcagttatcctcctac

SEQ ID NO: 183740 - DNA, 17 bp, synthetic construct
  source 1..17: mol_type = other DNA
cctcagttatcctccta

SEQ ID NO: 183741 - DNA, 17 bp, synthetic construct
  source 1..17: mol_type = other DNA
ccctcagttatcctcct

SEQ ID NO: 183742 - DNA, 17 bp, synthetic construct
  source 1..17: mol_type = other DNA
cccctcagttatcctcc

SEQ ID NO: 183743 - DNA, 17 bp, synthetic construct
  source 1..17: mol_type = other DNA
ccccctcagttatcctc

SEQ ID NO: 183744 - DNA, 17 bp, synthetic construct
  source 1..17: mol_type = other DNA
accccctcagttatcct

SEQ ID NO: 183745 - DNA, 17 bp, synthetic construct
  source 1..17: mol_type = other DNA
gaccccctcagttatcc

SEQ ID NO: 183746 - DNA, 17 bp, synthetic construct
  source 1..17: mol_type = other DNA
agaccccctcagttatc

SEQ ID NO: 183747 - DNA, 17 bp, synthetic construct
  source 1..17: mol_type = other DNA
cagaccccctcagttat

SEQ ID NO: 183748 - DNA, 17 bp, synthetic construct
  source 1..17: mol_type = other DNA
ccagaccccctcagtta

SEQ ID NO: 183749 - DNA, 17 bp, synthetic construct
  source 1..17: mol_type = other DNA
cccagaccccctcagtt

SEQ ID NO: 183750 - DNA, 17 bp, synthetic construct
  source 1..17: mol_type = other DNA
ccccagaccccctcagt

SEQ ID NO: 183751 - DNA, 17 bp, synthetic construct
  source 1..17: mol_type = other DNA
cccccagaccccctcag

SEQ ID NO: 183752 - DNA, 17 bp, synthetic construct
  source 1..17: mol_type = other DNA
acccccagaccccctca

SEQ ID NO: 183753 - DNA, 17 bp, synthetic construct
  source 1..17: mol_type = other DNA
cacccccagaccccctc

SEQ ID NO: 183754 - DNA, 17 bp, synthetic construct
  source 1..17: mol_type = other DNA
ccacccccagaccccct

SEQ ID NO: 183755 - DNA, 17 bp, synthetic construct
  source 1..17: mol_type = other DNA
cccacccccagaccccc

SEQ ID NO: 183756 - DNA, 17 bp, synthetic construct
  source 1..17: mol_type = other DNA
tcccacccccagacccc

SEQ ID NO: 183757 - DNA, 17 bp, synthetic construct
  source 1..17: mol_type = other DNA
gtcccacccccagaccc

SEQ ID NO: 183758 - DNA, 17 bp, synthetic construct
  source 1..17: mol_type = other DNA
tgtcccacccccagacc

SEQ ID NO: 183759 - DNA, 17 bp, synthetic construct
  source 1..17: mol_type = other DNA
ctgtcccacccccagac

SEQ ID NO: 183760 - DNA, 17 bp, synthetic construct
  source 1..17: mol_type = other DNA
cctgtcccacccccaga

SEQ ID NO: 183761 - DNA, 17 bp, synthetic construct
  source 1..17: mol_type = other DNA
tcctgtcccacccccag

SEQ ID NO: 183762 - DNA, 17 bp, synthetic construct
  source 1..17: mol_type = other DNA
gtcctgtcccaccccca

SEQ ID NO: 183763 - DNA, 17 bp, synthetic construct
  source 1..17: mol_type = other DNA
ggtcctgtcccaccccc

SEQ ID NO: 183764 - DNA, 17 bp, synthetic construct
  source 1..17: mol_type = other DNA
aggtcctgtcccacccc

SEQ ID NO: 183765 - DNA, 17 bp, synthetic construct
  source 1..17: mol_type = other DNA
caggtcctgtcccaccc

SEQ ID NO: 183766 - DNA, 17 bp, synthetic construct
  source 1..17: mol_type = other DNA
gcaggtcctgtcccacc

SEQ ID NO: 183767 - DNA, 17 bp, synthetic construct
  source 1..17: mol_type = other DNA
tgcaggtcctgtcccac

SEQ ID NO: 183768 - DNA, 17 bp, synthetic construct
  source 1..17: mol_type = other DNA
ctgcaggtcctgtccca

SEQ ID NO: 183769 - DNA, 17 bp, synthetic construct
  source 1..17: mol_type = other DNA
cctgcaggtcctgtccc

SEQ ID NO: 183770 - DNA, 17 bp, synthetic construct
  source 1..17: mol_type = other DNA
gcctgcaggtcctgtcc

SEQ ID NO: 183771 - DNA, 17 bp, synthetic construct
  source 1..17: mol_type = other DNA
agcctgcaggtcctgtc

SEQ ID NO: 183772 - DNA, 17 bp, synthetic construct
  source 1..17: mol_type = other DNA
cagcctgcaggtcctgt

SEQ ID NO: 183773 - DNA, 17 bp, synthetic construct
  source 1..17: mol_type = other DNA
gcagcctgcaggtcctg

SEQ ID NO: 183774 - DNA, 17 bp, synthetic construct
  source 1..17: mol_type = other DNA
agcagcctgcaggtcct

SEQ ID NO: 183775 - DNA, 17 bp, synthetic construct
  source 1..17: mol_type = other DNA
cagcagcctgcaggtcc

SEQ ID NO: 183776 - DNA, 17 bp, synthetic construct
  source 1..17: mol_type = other DNA
ccagcagcctgcaggtc

SEQ ID NO: 183777 - DNA, 17 bp, synthetic construct
  source 1..17: mol_type = other DNA
cccagcagcctgcaggt

SEQ ID NO: 183778 - DNA, 17 bp, synthetic construct
  source 1..17: mol_type = other DNA
ccccagcagcctgcagg

SEQ ID NO: 183779 - DNA, 17 bp, synthetic construct
  source 1..17: mol_type = other DNA
tccccagcagcctgcag

SEQ ID NO: 183780 - DNA, 17 bp, synthetic construct
  source 1..17: mol_type = other DNA
gtccccagcagcctgca

SEQ ID NO: 183781 - DNA, 17 bp, synthetic construct
  source 1..17: mol_type = other DNA
tgtccccagcagcctgc

SEQ ID NO: 183782 - DNA, 17 bp, synthetic construct
  source 1..17: mol_type = other DNA
ctgtccccagcagcctg

SEQ ID NO: 183783 - DNA, 17 bp, synthetic construct
  source 1..17: mol_type = other DNA
cctgtccccagcagcct

SEQ ID NO: 183784 - DNA, 17 bp, synthetic construct
  source 1..17: mol_type = other DNA
ccctgtccccagcagcc

SEQ ID NO: 183785 - DNA, 17 bp, synthetic construct
  source 1..17: mol_type = other DNA
cccctgtccccagcagc

SEQ ID NO: 183786 - DNA, 17 bp, synthetic construct
  source 1..17: mol_type = other DNA
gcccctgtccccagcag

SEQ ID NO: 183787 - DNA, 17 bp, synthetic construct
  source 1..17: mol_type = other DNA
agcccctgtccccagca

SEQ ID NO: 183788 - DNA, 17 bp, synthetic construct
  source 1..17: mol_type = other DNA
cagcccctgtccccagc

SEQ ID NO: 183789 - DNA, 17 bp, synthetic construct
  source 1..17: mol_type = other DNA
tcagcccctgtccccag

SEQ ID NO: 183790 - DNA, 17 bp, synthetic construct
  source 1..17: mol_type = other DNA
ctcagcccctgtcccca

SEQ ID NO: 183791 - DNA, 17 bp, synthetic construct
  source 1..17: mol_type = other DNA
cctcagcccctgtcccc

SEQ ID NO: 183792 - DNA, 17 bp, synthetic construct
  source 1..17: mol_type = other DNA
acctcagcccctgtccc

SEQ ID NO: 183793 - DNA, 17 bp, synthetic construct
  source 1..17: mol_type = other DNA
gacctcagcccctgtcc

SEQ ID NO: 183794 - DNA, 17 bp, synthetic construct
  source 1..17: mol_type = other DNA
tgacctcagcccctgtc

SEQ ID NO: 183795 - DNA, 17 bp, synthetic construct
  source 1..17: mol_type = other DNA
ctgacctcagcccctgt

SEQ ID NO: 183796 - DNA, 17 bp, synthetic construct
  source 1..17: mol_type = other DNA
cctgacctcagcccctg

SEQ ID NO: 183797 - DNA, 17 bp, synthetic construct
  source 1..17: mol_type = other DNA
acctgacctcagcccct

SEQ ID NO: 183798 - DNA, 17 bp, synthetic construct
  source 1..17: mol_type = other DNA
aacctgacctcagcccc

SEQ ID NO: 183799 - DNA, 17 bp, synthetic construct
  source 1..17: mol_type = other DNA
gaacctgacctcagccc

SEQ ID NO: 183800 - DNA, 17 bp, synthetic construct
  source 1..17: mol_type = other DNA
ggaacctgacctcagcc

SEQ ID NO: 183801 - DNA, 17 bp, synthetic construct
  source 1..17: mol_type = other DNA
tggaacctgacctcagc

SEQ ID NO: 183802 - DNA, 17 bp, synthetic construct
  source 1..17: mol_type = other DNA
ctggaacctgacctcag

SEQ ID NO: 183803 - DNA, 17 bp, synthetic construct
  source 1..17: mol_type = other DNA
cctggaacctgacctca

SEQ ID NO: 183804 - DNA, 17 bp, synthetic construct
  source 1..17: mol_type = other DNA
tcctggaacctgacctc

SEQ ID NO: 183805 - DNA, 17 bp, synthetic construct
  source 1..17: mol_type = other DNA
ttcctggaacctgacct

SEQ ID NO: 183806 - DNA, 17 bp, synthetic construct
  source 1..17: mol_type = other DNA
cttcctggaacctgacc

SEQ ID NO: 183807 - DNA, 17 bp, synthetic construct
  source 1..17: mol_type = other DNA
ccttcctggaacctgac

SEQ ID NO: 183808 - DNA, 17 bp, synthetic construct
  source 1..17: mol_type = other DNA
gccttcctggaacctga

SEQ ID NO: 183809 - DNA, 17 bp, synthetic construct
  source 1..17: mol_type = other DNA
tgccttcctggaacctg

SEQ ID NO: 183810 - DNA, 17 bp, synthetic construct
  source 1..17: mol_type = other DNA
ctgccttcctggaacct

SEQ ID NO: 183811 - DNA, 17 bp, synthetic construct
  source 1..17: mol_type = other DNA
cctgccttcctggaacc

SEQ ID NO: 183812 - DNA, 17 bp, synthetic construct
  source 1..17: mol_type = other DNA
ccctgccttcctggaac

SEQ ID NO: 183813 - DNA, 17 bp, synthetic construct
  source 1..17: mol_type = other DNA
cccctgccttcctggaa

SEQ ID NO: 183814 - DNA, 17 bp, synthetic construct
  source 1..17: mol_type = other DNA
acccctgccttcctgga

SEQ ID NO: 183815 - DNA, 17 bp, synthetic construct
  source 1..17: mol_type = other DNA
tacccctgccttcctgg

SEQ ID NO: 183816 - DNA, 17 bp, synthetic construct
  source 1..17: mol_type = other DNA
ctacccctgccttcctg

SEQ ID NO: 183817 - DNA, 17 bp, synthetic construct
  source 1..17: mol_type = other DNA
cctacccctgccttcct

SEQ ID NO: 183818 - DNA, 17 bp, synthetic construct
  source 1..17: mol_type = other DNA
gcctacccctgccttcc

SEQ ID NO: 183819 - DNA, 17 bp, synthetic construct
  source 1..17: mol_type = other DNA
tgcctacccctgccttc

SEQ ID NO: 183820 - DNA, 17 bp, synthetic construct
  source 1..17: mol_type = other DNA
ctgcctacccctgcctt

SEQ ID NO: 183821 - DNA, 17 bp, synthetic construct
  source 1..17: mol_type = other DNA
tctgcctacccctgcct

SEQ ID NO: 183822 - DNA, 17 bp, synthetic construct
  source 1..17: mol_type = other DNA
ctctgcctacccctgcc

SEQ ID NO: 183823 - DNA, 17 bp, synthetic construct
  source 1..17: mol_type = other DNA
tctctgcctacccctgc

SEQ ID NO: 183824 - DNA, 17 bp, synthetic construct
  source 1..17: mol_type = other DNA
ctctctgcctacccctg

SEQ ID NO: 183825 - DNA, 17 bp, synthetic construct
  source 1..17: mol_type = other DNA
tctctctgcctacccct

SEQ ID NO: 183826 - DNA, 17 bp, synthetic construct
  source 1..17: mol_type = other DNA
ttctctctgcctacccc

SEQ ID NO: 183827 - DNA, 17 bp, synthetic construct
  source 1..17: mol_type = other DNA
cttctctctgcctaccc

SEQ ID NO: 183828 - DNA, 17 bp, synthetic construct
  source 1..17: mol_type = other DNA
ccttctctctgcctacc

SEQ ID NO: 183829 - DNA, 17 bp, synthetic construct
  source 1..17: mol_type = other DNA
accttctctctgcctac

SEQ ID NO: 183830 - DNA, 17 bp, synthetic construct
  source 1..17: mol_type = other DNA
caccttctctctgccta

SEQ ID NO: 183831 - DNA, 17 bp, synthetic construct
  source 1..17: mol_type = other DNA
gcaccttctctctgcct

SEQ ID NO: 183832 - DNA, 17 bp, synthetic construct
  source 1..17: mol_type = other DNA
agcaccttctctctgcc

SEQ ID NO: 183833 - DNA, 17 bp, synthetic construct
  source 1..17: mol_type = other DNA
cagcaccttctctctgc

SEQ ID NO: 183834 - DNA, 17 bp, synthetic construct
  source 1..17: mol_type = other DNA
ccagcaccttctctctg

SEQ ID NO: 183835 - DNA, 17 bp, synthetic construct
  source 1..17: mol_type = other DNA
tccagcaccttctctct

SEQ ID NO: 183836 - DNA, 17 bp, synthetic construct
  source 1..17: mol_type = other DNA
ttccagcaccttctctc

SEQ ID NO: 183837 - DNA, 17 bp, synthetic construct
  source 1..17: mol_type = other DNA
tttccagcaccttctct

SEQ ID NO: 183838 - DNA, 17 bp, synthetic construct
  source 1..17: mol_type = other DNA
gtttccagcaccttctc

SEQ ID NO: 183839 - DNA, 17 bp, synthetic construct
  source 1..17: mol_type = other DNA
agtttccagcaccttct

SEQ ID NO: 183840 - DNA, 17 bp, synthetic construct
  source 1..17: mol_type = other DNA
cagtttccagcaccttc

SEQ ID NO: 183841 - DNA, 17 bp, synthetic construct
  source 1..17: mol_type = other DNA
ccagtttccagcacctt

SEQ ID NO: 183842 - DNA, 17 bp, synthetic construct
  source 1..17: mol_type = other DNA
cccagtttccagcacct

SEQ ID NO: 183843 - DNA, 17 bp, synthetic construct
  source 1..17: mol_type = other DNA
ccccagtttccagcacc

SEQ ID NO: 183844 - DNA, 17 bp, synthetic construct
  source 1..17: mol_type = other DNA
accccagtttccagcac

SEQ ID NO: 183845 - DNA, 17 bp, synthetic construct
  source 1..17: mol_type = other DNA
caccccagtttccagca

SEQ ID NO: 183846 - DNA, 17 bp, synthetic construct
  source 1..17: mol_type = other DNA
tcaccccagtttccagc

SEQ ID NO: 183847 - DNA, 17 bp, synthetic construct
  source 1..17: mol_type = other DNA
ctcaccccagtttccag

SEQ ID NO: 183848 - DNA, 17 bp, synthetic construct
  source 1..17: mol_type = other DNA
cctcaccccagtttcca

SEQ ID NO: 183849 - DNA, 17 bp, synthetic construct
  source 1..17: mol_type = other DNA
gcctcaccccagtttcc

SEQ ID NO: 183850 - DNA, 17 bp, synthetic construct
  source 1..17: mol_type = other DNA
agcctcaccccagtttc

SEQ ID NO: 183851 - DNA, 17 bp, synthetic construct
  source 1..17: mol_type = other DNA
cagcctcaccccagttt

SEQ ID NO: 183852 - DNA, 17 bp, synthetic construct
  source 1..17: mol_type = other DNA
tcagcctcaccccagtt

SEQ ID NO: 183853 - DNA, 17 bp, synthetic construct
  source 1..17: mol_type = other DNA
ctcagcctcaccccagt

SEQ ID NO: 183854 - DNA, 17 bp, synthetic construct
  source 1..17: mol_type = other DNA
gctcagcctcaccccag

SEQ ID NO: 183855 - DNA, 17 bp, synthetic construct
  source 1..17: mol_type = other DNA
ggctcagcctcacccca

SEQ ID NO: 183856 - DNA, 17 bp, synthetic construct
  source 1..17: mol_type = other DNA
cggctcagcctcacccc

SEQ ID NO: 183857 - DNA, 17 bp, synthetic construct
  source 1..17: mol_type = other DNA
ccggctcagcctcaccc

SEQ ID NO: 183858 - DNA, 17 bp, synthetic construct
  source 1..17: mol_type = other DNA
cccggctcagcctcacc

SEQ ID NO: 183859 - DNA, 17 bp, synthetic construct
  source 1..17: mol_type = other DNA
tcccggctcagcctcac

SEQ ID NO: 183860 - DNA, 17 bp, synthetic construct
  source 1..17: mol_type = other DNA
atcccggctcagcctca

SEQ ID NO: 183861 - DNA, 17 bp, synthetic construct
  source 1..17: mol_type = other DNA
tatcccggctcagcctc

SEQ ID NO: 183862 - DNA, 17 bp, synthetic construct
  source 1..17: mol_type = other DNA
ttatcccggctcagcct

SEQ ID NO: 183863 - DNA, 17 bp, synthetic construct
  source 1..17: mol_type = other DNA
gttatcccggctcagcc

SEQ ID NO: 183864 - DNA, 17 bp, synthetic construct
  source 1..17: mol_type = other DNA
agttatcccggctcagc

SEQ ID NO: 183865 - DNA, 17 bp, synthetic construct
  source 1..17: mol_type = other DNA
cagttatcccggctcag

SEQ ID NO: 183866 - DNA, 17 bp, synthetic construct
  source 1..17: mol_type = other DNA
tcagttatcccggctca

SEQ ID NO: 183867 - DNA, 17 bp, synthetic construct
  source 1..17: mol_type = other DNA
ctcagttatcccggctc

SEQ ID NO: 183868 - DNA, 17 bp, synthetic construct
  source 1..17: mol_type = other DNA
actcagttatcccggct

SEQ ID NO: 183869 - DNA, 17 bp, synthetic construct
  source 1..17: mol_type = other DNA
cactcagttatcccggc

SEQ ID NO: 183870 - DNA, 17 bp, synthetic construct
  source 1..17: mol_type = other DNA
ccactcagttatcccgg

SEQ ID NO: 183871 - DNA, 17 bp, synthetic construct
  source 1..17: mol_type = other DNA
cccactcagttatcccg

SEQ ID NO: 183872 - DNA, 17 bp, synthetic construct
  source 1..17: mol_type = other DNA
ccccactcagttatccc

SEQ ID NO: 183873 - DNA, 17 bp, synthetic construct
  source 1..17: mol_type = other DNA
cccccactcagttatcc

SEQ ID NO: 183874 - DNA, 17 bp, synthetic construct
  source 1..17: mol_type = other DNA
gcccccactcagttatc

SEQ ID NO: 183875 - DNA, 17 bp, synthetic construct
  source 1..17: mol_type = other DNA
tgcccccactcagttat

SEQ ID NO: 183876 - DNA, 17 bp, synthetic construct
  source 1..17: mol_type = other DNA
ttgcccccactcagtta

SEQ ID NO: 183877 - DNA, 17 bp, synthetic construct
  source 1..17: mol_type = other DNA
gttgcccccactcagtt

SEQ ID NO: 183878 - DNA, 17 bp, synthetic construct
  source 1..17: mol_type = other DNA
agttgcccccactcagt

SEQ ID NO: 183879 - DNA, 17 bp, synthetic construct
  source 1..17: mol_type = other DNA
aagttgcccccactcag

SEQ ID NO: 183880 - DNA, 17 bp, synthetic construct
  source 1..17: mol_type = other DNA
gaagttgcccccactca

SEQ ID NO: 183881 - DNA, 17 bp, synthetic construct
  source 1..17: mol_type = other DNA
agaagttgcccccactc

SEQ ID NO: 183882 - DNA, 17 bp, synthetic construct
  source 1..17: mol_type = other DNA
aagaagttgcccccact

SEQ ID NO: 183883 - DNA, 17 bp, synthetic construct
  source 1..17: mol_type = other DNA
gaagaagttgcccccac

SEQ ID NO: 183884 - DNA, 17 bp, synthetic construct
  source 1..17: mol_type = other DNA
cgaagaagttgccccca

SEQ ID NO: 183885 - DNA, 17 bp, synthetic construct
  source 1..17: mol_type = other DNA
ccgaagaagttgccccc

SEQ ID NO: 183886 - DNA, 17 bp, synthetic construct
  source 1..17: mol_type = other DNA
cccgaagaagttgcccc

SEQ ID NO: 183887 - DNA, 17 bp, synthetic construct
  source 1..17: mol_type = other DNA
acccgaagaagttgccc

SEQ ID NO: 183888 - DNA, 17 bp, synthetic construct
  source 1..17: mol_type = other DNA
tacccgaagaagttgcc

SEQ ID NO: 183889 - DNA, 17 bp, synthetic construct
  source 1..17: mol_type = other DNA
atacccgaagaagttgc

SEQ ID NO: 183890 - DNA, 17 bp, synthetic construct
  source 1..17: mol_type = other DNA
tatacccgaagaagttg

SEQ ID NO: 183891 - DNA, 17 bp, synthetic construct
  source 1..17: mol_type = other DNA
ctatacccgaagaagtt

SEQ ID NO: 183892 - DNA, 17 bp, synthetic construct
  source 1..17: mol_type = other DNA
cctatacccgaagaagt

SEQ ID NO: 183893 - DNA, 17 bp, synthetic construct
  source 1..17: mol_type = other DNA
gcctatacccgaagaag

SEQ ID NO: 183894 - DNA, 17 bp, synthetic construct
  source 1..17: mol_type = other DNA
ggcctatacccgaagaa

SEQ ID NO: 183895 - DNA, 17 bp, synthetic construct
  source 1..17: mol_type = other DNA
gggcctatacccgaaga

SEQ ID NO: 183896 - DNA, 17 bp, synthetic construct
  source 1..17: mol_type = other DNA
tgggcctatacccgaag

SEQ ID NO: 183897 - DNA, 17 bp, synthetic construct
  source 1..17: mol_type = other DNA
ctgggcctatacccgaa

SEQ ID NO: 183898 - DNA, 17 bp, synthetic construct
  source 1..17: mol_type = other DNA
cctgggcctatacccga

SEQ ID NO: 183899 - DNA, 17 bp, synthetic construct
  source 1..17: mol_type = other DNA
gcctgggcctatacccg

SEQ ID NO: 183900 - DNA, 17 bp, synthetic construct
  source 1..17: mol_type = other DNA
tgcctgggcctataccc

SEQ ID NO: 183901 - DNA, 17 bp, synthetic construct
  source 1..17: mol_type = other DNA
ctgcctgggcctatacc

SEQ ID NO: 183902 - DNA, 17 bp, synthetic construct
  source 1..17: mol_type = other DNA
cctgcctgggcctatac

SEQ ID NO: 183903 - DNA, 17 bp, synthetic construct
  source 1..17: mol_type = other DNA
ccctgcctgggcctata

SEQ ID NO: 183904 - DNA, 17 bp, synthetic construct
  source 1..17: mol_type = other DNA
tccctgcctgggcctat

SEQ ID NO: 183905 - DNA, 17 bp, synthetic construct
  source 1..17: mol_type = other DNA
gtccctgcctgggccta

SEQ ID NO: 183906 - DNA, 17 bp, synthetic construct
  source 1..17: mol_type = other DNA
tgtccctgcctgggcct

SEQ ID NO: 183907 - DNA, 17 bp, synthetic construct
  source 1..17: mol_type = other DNA
ctgtccctgcctgggcc

SEQ ID NO: 183908 - DNA, 17 bp, synthetic construct
  source 1..17: mol_type = other DNA
cctgtccctgcctgggc

SEQ ID NO: 183909 - DNA, 17 bp, synthetic construct
  source 1..17: mol_type = other DNA
ccctgtccctgcctggg

SEQ ID NO: 183910 - DNA, 17 bp, synthetic construct
  source 1..17: mol_type = other DNA
gccctgtccctgcctgg

SEQ ID NO: 183911 - DNA, 17 bp, synthetic construct
  source 1..17: mol_type = other DNA
agccctgtccctgcctg

SEQ ID NO: 183912 - DNA, 17 bp, synthetic construct
  source 1..17: mol_type = other DNA
tagccctgtccctgcct

SEQ ID NO: 183913 - DNA, 17 bp, synthetic construct
  source 1..17: mol_type = other DNA
ttagccctgtccctgcc

SEQ ID NO: 183914 - DNA, 17 bp, synthetic construct
  source 1..17: mol_type = other DNA
cttagccctgtccctgc

SEQ ID NO: 183915 - DNA, 17 bp, synthetic construct
  source 1..17: mol_type = other DNA
ccttagccctgtccctg

SEQ ID NO: 183916 - DNA, 17 bp, synthetic construct
  source 1..17: mol_type = other DNA
cccttagccctgtccct

SEQ ID NO: 183917 - DNA, 17 bp, synthetic construct
  source 1..17: mol_type = other DNA
ccccttagccctgtccc

SEQ ID NO: 183918 - DNA, 17 bp, synthetic construct
  source 1..17: mol_type = other DNA
accccttagccctgtcc

SEQ ID NO: 183919 - DNA, 17 bp, synthetic construct
  source 1..17: mol_type = other DNA
gaccccttagccctgtc

SEQ ID NO: 183920 - DNA, 17 bp, synthetic construct
  source 1..17: mol_type = other DNA
ggaccccttagccctgt

SEQ ID NO: 183921 - DNA, 17 bp, synthetic construct
  source 1..17: mol_type = other DNA
aggaccccttagccctg

SEQ ID NO: 183922 - DNA, 17 bp, synthetic construct
  source 1..17: mol_type = other DNA
caggaccccttagccct

SEQ ID NO: 183923 - DNA, 17 bp, synthetic construct
  source 1..17: mol_type = other DNA
ccaggaccccttagccc

SEQ ID NO: 183924 - DNA, 17 bp, synthetic construct
  source 1..17: mol_type = other DNA
tccaggaccccttagcc

SEQ ID NO: 183925 - DNA, 17 bp, synthetic construct
  source 1..17: mol_type = other DNA
gtccaggaccccttagc

SEQ ID NO: 183926 - DNA, 17 bp, synthetic construct
  source 1..17: mol_type = other DNA
ggtccaggaccccttag

SEQ ID NO: 183927 - DNA, 17 bp, synthetic construct
  source 1..17: mol_type = other DNA
tggtccaggacccctta

SEQ ID NO: 183928 - DNA, 17 bp, synthetic construct
  source 1..17: mol_type = other DNA
gtggtccaggacccctt

SEQ ID NO: 183929 - DNA, 17 bp, synthetic construct
  source 1..17: mol_type = other DNA
agtggtccaggacccct

SEQ ID NO: 183930 - DNA, 17 bp, synthetic construct
  source 1..17: mol_type = other DNA
cagtggtccaggacccc

SEQ ID NO: 183931 - DNA, 17 bp, synthetic construct
  source 1..17: mol_type = other DNA
ccagtggtccaggaccc

SEQ ID NO: 183932 - DNA, 17 bp, synthetic construct
  source 1..17: mol_type = other DNA
cccagtggtccaggacc

SEQ ID NO: 183933 - DNA, 17 bp, synthetic construct
  source 1..17: mol_type = other DNA
ccccagtggtccaggac

SEQ ID NO: 183934 - DNA, 17 bp, synthetic construct
  source 1..17: mol_type = other DNA
accccagtggtccagga

SEQ ID NO: 183935 - DNA, 17 bp, synthetic construct
  source 1..17: mol_type = other DNA
caccccagtggtccagg

SEQ ID NO: 183936 - DNA, 17 bp, synthetic construct
  source 1..17: mol_type = other DNA
acaccccagtggtccag

SEQ ID NO: 183937 - DNA, 17 bp, synthetic construct
  source 1..17: mol_type = other DNA
tacaccccagtggtcca

SEQ ID NO: 183938 - DNA, 17 bp, synthetic construct
  source 1..17: mol_type = other DNA
ctacaccccagtggtcc

SEQ ID NO: 183939 - DNA, 17 bp, synthetic construct
  source 1..17: mol_type = other DNA
tctacaccccagtggtc

SEQ ID NO: 183940 - DNA, 17 bp, synthetic construct
  source 1..17: mol_type = other DNA
gtctacaccccagtggt

SEQ ID NO: 183941 - DNA, 17 bp, synthetic construct
  source 1..17: mol_type = other DNA
tgtctacaccccagtgg

SEQ ID NO: 183942 - DNA, 17 bp, synthetic construct
  source 1..17: mol_type = other DNA
ctgtctacaccccagtg

SEQ ID NO: 183943 - DNA, 17 bp, synthetic construct
  source 1..17: mol_type = other DNA
cctgtctacaccccagt

SEQ ID NO: 183944 - DNA, 17 bp, synthetic construct
  source 1..17: mol_type = other DNA
tcctgtctacaccccag

SEQ ID NO: 183945 - DNA, 17 bp, synthetic construct
  source 1..17: mol_type = other DNA
ctcctgtctacacccca

SEQ ID NO: 183946 - DNA, 17 bp, synthetic construct
  source 1..17: mol_type = other DNA
cctcctgtctacacccc

SEQ ID NO: 183947 - DNA, 17 bp, synthetic construct
  source 1..17: mol_type = other DNA
ccctcctgtctacaccc

SEQ ID NO: 183948 - DNA, 17 bp, synthetic construct
  source 1..17: mol_type = other DNA
gccctcctgtctacacc

SEQ ID NO: 183949 - DNA, 17 bp, synthetic construct
  source 1..17: mol_type = other DNA
tgccctcctgtctacac

SEQ ID NO: 183950 - DNA, 17 bp, synthetic construct
  source 1..17: mol_type = other DNA
ctgccctcctgtctaca

SEQ ID NO: 183951 - DNA, 17 bp, synthetic construct
  source 1..17: mol_type = other DNA
cctgccctcctgtctac

SEQ ID NO: 183952 - DNA, 17 bp, synthetic construct
  source 1..17: mol_type = other DNA
gcctgccctcctgtcta

SEQ ID NO: 183953 - DNA, 17 bp, synthetic construct
  source 1..17: mol_type = other DNA
agcctgccctcctgtct

SEQ ID NO: 183954 - DNA, 17 bp, synthetic construct
  source 1..17: mol_type = other DNA
cagcctgccctcctgtc

SEQ ID NO: 183955 - DNA, 17 bp, synthetic construct
  source 1..17: mol_type = other DNA
ccagcctgccctcctgt

SEQ ID NO: 183956 - DNA, 17 bp, synthetic construct
  source 1..17: mol_type = other DNA
cccagcctgccctcctg

SEQ ID NO: 183957 - DNA, 17 bp, synthetic construct
  source 1..17: mol_type = other DNA
gcccagcctgccctcct

SEQ ID NO: 183958 - DNA, 17 bp, synthetic construct
  source 1..17: mol_type = other DNA
ggcccagcctgccctcc

SEQ ID NO: 183959 - DNA, 17 bp, synthetic construct
  source 1..17: mol_type = other DNA
cggcccagcctgccctc

SEQ ID NO: 183960 - DNA, 17 bp, synthetic construct
  source 1..17: mol_type = other DNA
ccggcccagcctgccct

SEQ ID NO: 183961 - DNA, 17 bp, synthetic construct
  source 1..17: mol_type = other DNA
cccggcccagcctgccc

SEQ ID NO: 183962 - DNA, 17 bp, synthetic construct
  source 1..17: mol_type = other DNA
ccccggcccagcctgcc

SEQ ID NO: 183963 - DNA, 17 bp, synthetic construct
  source 1..17: mol_type = other DNA
gccccggcccagcctgc

SEQ ID NO: 183964 - DNA, 17 bp, synthetic construct
  source 1..17: mol_type = other DNA
tgccccggcccagcctg

SEQ ID NO: 183965 - DNA, 17 bp, synthetic construct
  source 1..17: mol_type = other DNA
atgccccggcccagcct

SEQ ID NO: 183966 - DNA, 17 bp, synthetic construct
  source 1..17: mol_type = other DNA
catgccccggcccagcc

SEQ ID NO: 183967 - DNA, 17 bp, synthetic construct
  source 1..17: mol_type = other DNA
acatgccccggcccagc

SEQ ID NO: 183968 - DNA, 17 bp, synthetic construct
  source 1..17: mol_type = other DNA
cacatgccccggcccag

SEQ ID NO: 183969 - DNA, 17 bp, synthetic construct
  source 1..17: mol_type = other DNA
gcacatgccccggccca

SEQ ID NO: 183970 - DNA, 17 bp, synthetic construct
  source 1..17: mol_type = other DNA
agcacatgccccggccc

SEQ ID NO: 183971 - DNA, 17 bp, synthetic construct
  source 1..17: mol_type = other DNA
cagcacatgccccggcc

SEQ ID NO: 183972 - DNA, 17 bp, synthetic construct
  source 1..17: mol_type = other DNA
ccagcacatgccccggc

SEQ ID NO: 183973 - DNA, 17 bp, synthetic construct
  source 1..17: mol_type = other DNA
tccagcacatgccccgg

SEQ ID NO: 183974 - DNA, 17 bp, synthetic construct
  source 1..17: mol_type = other DNA
ctccagcacatgccccg

SEQ ID NO: 183975 - DNA, 17 bp, synthetic construct
  source 1..17: mol_type = other DNA
cctccagcacatgcccc

SEQ ID NO: 183976 - DNA, 17 bp, synthetic construct
  source 1..17: mol_type = other DNA
tcctccagcacatgccc

SEQ ID NO: 183977 - DNA, 17 bp, synthetic construct
  source 1..17: mol_type = other DNA
ctcctccagcacatgcc

SEQ ID NO: 183978 - DNA, 17 bp, synthetic construct
  source 1..17: mol_type = other DNA
tctcctccagcacatgc

SEQ ID NO: 183979 - DNA, 17 bp, synthetic construct
  source 1..17: mol_type = other DNA
ctctcctccagcacatg

SEQ ID NO: 183980 - DNA, 17 bp, synthetic construct
  source 1..17: mol_type = other DNA
cctctcctccagcacat

SEQ ID NO: 183981 - DNA, 17 bp, synthetic construct
  source 1..17: mol_type = other DNA
ccctctcctccagcaca

SEQ ID NO: 183982 - DNA, 17 bp, synthetic construct
  source 1..17: mol_type = other DNA
accctctcctccagcac

SEQ ID NO: 183983 - DNA, 17 bp, synthetic construct
  source 1..17: mol_type = other DNA
aaccctctcctccagca

SEQ ID NO: 183984 - DNA, 17 bp, synthetic construct
  source 1..17: mol_type = other DNA
taaccctctcctccagc

SEQ ID NO: 183985 - DNA, 17 bp, synthetic construct
  source 1..17: mol_type = other DNA
ctaaccctctcctccag

SEQ ID NO: 183986 - DNA, 17 bp, synthetic construct
  source 1..17: mol_type = other DNA
cctaaccctctcctcca

SEQ ID NO: 183987 - DNA, 17 bp, synthetic construct
  source 1..17: mol_type = other DNA
ccctaaccctctcctcc

SEQ ID NO: 183988 - DNA, 17 bp, synthetic construct
  source 1..17: mol_type = other DNA
gccctaaccctctcctc

SEQ ID NO: 183989 - DNA, 17 bp, synthetic construct
  source 1..17: mol_type = other DNA
ggccctaaccctctcct

SEQ ID NO: 183990 - DNA, 17 bp, synthetic construct
  source 1..17: mol_type = other DNA
aggccctaaccctctcc

SEQ ID NO: 183991 - DNA, 17 bp, synthetic construct
  source 1..17: mol_type = other DNA
caggccctaaccctctc

SEQ ID NO: 183992 - DNA, 17 bp, synthetic construct
  source 1..17: mol_type = other DNA
tcaggccctaaccctct

SEQ ID NO: 183993 - DNA, 17 bp, synthetic construct
  source 1..17: mol_type = other DNA
gtcaggccctaaccctc

SEQ ID NO: 183994 - DNA, 17 bp, synthetic construct
  source 1..17: mol_type = other DNA
cgtcaggccctaaccct

SEQ ID NO: 183995 - DNA, 17 bp, synthetic construct
  source 1..17: mol_type = other DNA
gcgtcaggccctaaccc

SEQ ID NO: 183996 - DNA, 17 bp, synthetic construct
  source 1..17: mol_type = other DNA
ggcgtcaggccctaacc

SEQ ID NO: 183997 - DNA, 17 bp, synthetic construct
  source 1..17: mol_type = other DNA
gggcgtcaggccctaac

SEQ ID NO: 183998 - DNA, 17 bp, synthetic construct
  source 1..17: mol_type = other DNA
ggggcgtcaggccctaa

SEQ ID NO: 183999 - DNA, 17 bp, synthetic construct
  source 1..17: mol_type = other DNA
aggggcgtcaggcccta

SEQ ID NO: 184000 - DNA, 17 bp, synthetic construct
  source 1..17: mol_type = other DNA
gaggggcgtcaggccct

SEQ ID NO: 184001 - DNA, 17 bp, synthetic construct
  source 1..17: mol_type = other DNA
tgaggggcgtcaggccc

SEQ ID NO: 184002 - DNA, 17 bp, synthetic construct
  source 1..17: mol_type = other DNA
atgaggggcgtcaggcc

SEQ ID NO: 184003 - DNA, 17 bp, synthetic construct
  source 1..17: mol_type = other DNA
catgaggggcgtcaggc

SEQ ID NO: 184004 - DNA, 17 bp, synthetic construct
  source 1..17: mol_type = other DNA
acatgaggggcgtcagg

SEQ ID NO: 184005 - DNA, 17 bp, synthetic construct
  source 1..17: mol_type = other DNA
gacatgaggggcgtcag

SEQ ID NO: 184006 - DNA, 17 bp, synthetic construct
  source 1..17: mol_type = other DNA
ggacatgaggggcgtca

SEQ ID NO: 184007 - DNA, 17 bp, synthetic construct
  source 1..17: mol_type = other DNA
gggacatgaggggcgtc

SEQ ID NO: 184008 - DNA, 17 bp, synthetic construct
  source 1..17: mol_type = other DNA
ggggacatgaggggcgt

SEQ ID NO: 184009 - DNA, 17 bp, synthetic construct
  source 1..17: mol_type = other DNA
tggggacatgaggggcg

SEQ ID NO: 184010 - DNA, 17 bp, synthetic construct
  source 1..17: mol_type = other DNA
gtggggacatgaggggc

SEQ ID NO: 184011 - DNA, 17 bp, synthetic construct
  source 1..17: mol_type = other DNA
tgtggggacatgagggg

SEQ ID NO: 184012 - DNA, 17 bp, synthetic construct
  source 1..17: mol_type = other DNA
ctgtggggacatgaggg

SEQ ID NO: 184013 - DNA, 17 bp, synthetic construct
  source 1..17: mol_type = other DNA
cctgtggggacatgagg

SEQ ID NO: 184014 - DNA, 17 bp, synthetic construct
  source 1..17: mol_type = other DNA
ccctgtggggacatgag

SEQ ID NO: 184015 - DNA, 17 bp, synthetic construct
  source 1..17: mol_type = other DNA
gccctgtggggacatga

SEQ ID NO: 184016 - DNA, 17 bp, synthetic construct
  source 1..17: mol_type = other DNA
agccctgtggggacatg

SEQ ID NO: 184017 - DNA, 17 bp, synthetic construct
  source 1..17: mol_type = other DNA
aagccctgtggggacat

SEQ ID NO: 184018 - DNA, 17 bp, synthetic construct
  source 1..17: mol_type = other DNA
aaagccctgtggggaca

SEQ ID NO: 184019 - DNA, 17 bp, synthetic construct
  source 1..17: mol_type = other DNA
caaagccctgtggggac

SEQ ID NO: 184020 - DNA, 17 bp, synthetic construct
  source 1..17: mol_type = other DNA
tcaaagccctgtgggga

SEQ ID NO: 184021 - DNA, 17 bp, synthetic construct
  source 1..17: mol_type = other DNA
ctcaaagccctgtgggg

SEQ ID NO: 184022 - DNA, 17 bp, synthetic construct
  source 1..17: mol_type = other DNA
actcaaagccctgtggg

SEQ ID NO: 184023 - DNA, 17 bp, synthetic construct
  source 1..17: mol_type = other DNA
tactcaaagccctgtgg

SEQ ID NO: 184024 - DNA, 17 bp, synthetic construct
  source 1..17: mol_type = other DNA
gtactcaaagccctgtg

SEQ ID NO: 184025 - DNA, 17 bp, synthetic construct
  source 1..17: mol_type = other DNA
tgtactcaaagccctgt

SEQ ID NO: 184026 - DNA, 17 bp, synthetic construct
  source 1..17: mol_type = other DNA
ttgtactcaaagccctg

SEQ ID NO: 184027 - DNA, 17 bp, synthetic construct
  source 1..17: mol_type = other DNA
cttgtactcaaagccct

SEQ ID NO: 184028 - DNA, 17 bp, synthetic construct
  source 1..17: mol_type = other DNA
tcttgtactcaaagccc

SEQ ID NO: 184029 - DNA, 17 bp, synthetic construct
  source 1..17: mol_type = other DNA
ctcttgtactcaaagcc

SEQ ID NO: 184030 - DNA, 17 bp, synthetic construct
  source 1..17: mol_type = other DNA
tctcttgtactcaaagc

SEQ ID NO: 184031 - DNA, 17 bp, synthetic construct
  source 1..17: mol_type = other DNA
ctctcttgtactcaaag

SEQ ID NO: 184032 - DNA, 17 bp, synthetic construct
  source 1..17: mol_type = other DNA
actctcttgtactcaaa

SEQ ID NO: 184033 - DNA, 17 bp, synthetic construct
  source 1..17: mol_type = other DNA
cactctcttgtactcaa

SEQ ID NO: 184034 - DNA, 17 bp, synthetic construct
  source 1..17: mol_type = other DNA
ccactctcttgtactca

SEQ ID NO: 184035 - DNA, 17 bp, synthetic construct
  source 1..17: mol_type = other DNA
gccactctcttgtactc

SEQ ID NO: 184036 - DNA, 17 bp, synthetic construct
  source 1..17: mol_type = other DNA
ggccactctcttgtact

SEQ ID NO: 184037 - DNA, 17 bp, synthetic construct
  source 1..17: mol_type = other DNA
cggccactctcttgtac

SEQ ID NO: 184038 - DNA, 17 bp, synthetic construct
  source 1..17: mol_type = other DNA
ccggccactctcttgta

SEQ ID NO: 184039 - DNA, 17 bp, synthetic construct
  source 1..17: mol_type = other DNA
cccggccactctcttgt

SEQ ID NO: 184040 - DNA, 17 bp, synthetic construct
  source 1..17: mol_type = other DNA
gcccggccactctcttg

SEQ ID NO: 184041 - DNA, 17 bp, synthetic construct
  source 1..17: mol_type = other DNA
tgcccggccactctctt

SEQ ID NO: 184042 - DNA, 17 bp, synthetic construct
  source 1..17: mol_type = other DNA
ctgcccggccactctct

SEQ ID NO: 184043 - DNA, 17 bp, synthetic construct
  source 1..17: mol_type = other DNA
actgcccggccactctc

SEQ ID NO: 184044 - DNA, 17 bp, synthetic construct
  source 1..17: mol_type = other DNA
cactgcccggccactct

SEQ ID NO: 184045 - DNA, 17 bp, synthetic construct
  source 1..17: mol_type = other DNA
gcactgcccggccactc

SEQ ID NO: 184046 - DNA, 17 bp, synthetic construct
  source 1..17: mol_type = other DNA
agcactgcccggccact

SEQ ID NO: 184047 - DNA, 17 bp, synthetic construct
  source 1..17: mol_type = other DNA
cagcactgcccggccac

SEQ ID NO: 184048 - DNA, 17 bp, synthetic construct
  source 1..17: mol_type = other DNA
acagcactgcccggcca

SEQ ID NO: 184049 - DNA, 17 bp, synthetic construct
  source 1..17: mol_type = other DNA
cacagcactgcccggcc

SEQ ID NO: 184050 - DNA, 17 bp, synthetic construct
  source 1..17: mol_type = other DNA
ccacagcactgcccggc

SEQ ID NO: 184051 - DNA, 17 bp, synthetic construct
  source 1..17: mol_type = other DNA
cccacagcactgcccgg

SEQ ID NO: 184052 - DNA, 17 bp, synthetic construct
  source 1..17: mol_type = other DNA
ccccacagcactgcccg

SEQ ID NO: 184053 - DNA, 17 bp, synthetic construct
  source 1..17: mol_type = other DNA
tccccacagcactgccc

SEQ ID NO: 184054 - DNA, 17 bp, synthetic construct
  source 1..17: mol_type = other DNA
ctccccacagcactgcc

SEQ ID NO: 184055 - DNA, 17 bp, synthetic construct
  source 1..17: mol_type = other DNA
actccccacagcactgc

SEQ ID NO: 184056 - DNA, 17 bp, synthetic construct
  source 1..17: mol_type = other DNA
cactccccacagcactg

SEQ ID NO: 184057 - DNA, 17 bp, synthetic construct
  source 1..17: mol_type = other DNA
gcactccccacagcact

SEQ ID NO: 184058 - DNA, 17 bp, synthetic construct
  source 1..17: mol_type = other DNA
cgcactccccacagcac

SEQ ID NO: 184059 - DNA, 17 bp, synthetic construct
  source 1..17: mol_type = other DNA
acgcactccccacagca

SEQ ID NO: 184060 - DNA, 17 bp, synthetic construct
  source 1..17: mol_type = other DNA
gacgcactccccacagc

SEQ ID NO: 184061 - DNA, 17 bp, synthetic construct
  source 1..17: mol_type = other DNA
ggacgcactccccacag

SEQ ID NO: 184062 - DNA, 17 bp, synthetic construct
  source 1..17: mol_type = other DNA
tggacgcactccccaca

SEQ ID NO: 184063 - DNA, 17 bp, synthetic construct
  source 1..17: mol_type = other DNA
ctggacgcactccccac

SEQ ID NO: 184064 - DNA, 17 bp, synthetic construct
  source 1..17: mol_type = other DNA
tctggacgcactcccca

SEQ ID NO: 184065 - DNA, 17 bp, synthetic construct
  source 1..17: mol_type = other DNA
gtctggacgcactcccc

SEQ ID NO: 184066 - DNA, 17 bp, synthetic construct
  source 1..17: mol_type = other DNA
ggtctggacgcactccc

SEQ ID NO: 184067 - DNA, 17 bp, synthetic construct
  source 1..17: mol_type = other DNA
cggtctggacgcactcc

SEQ ID NO: 184068 - DNA, 17 bp, synthetic construct
  source 1..17: mol_type = other DNA
gcggtctggacgcactc

SEQ ID NO: 184069 - DNA, 17 bp, synthetic construct
  source 1..17: mol_type = other DNA
ggcggtctggacgcact

SEQ ID NO: 184070 - DNA, 17 bp, synthetic construct
  source 1..17: mol_type = other DNA
aggcggtctggacgcac

SEQ ID NO: 184071 - DNA, 17 bp, synthetic construct
  source 1..17: mol_type = other DNA
caggcggtctggacgca

SEQ ID NO: 184072 - DNA, 17 bp, synthetic construct
  source 1..17: mol_type = other DNA
gcaggcggtctggacgc

SEQ ID NO: 184073 - DNA, 17 bp, synthetic construct
  source 1..17: mol_type = other DNA
ggcaggcggtctggacg

SEQ ID NO: 184074 - DNA, 17 bp, synthetic construct
  source 1..17: mol_type = other DNA
aggcaggcggtctggac

SEQ ID NO: 184075 - DNA, 17 bp, synthetic construct
  source 1..17: mol_type = other DNA
gaggcaggcggtctgga

SEQ ID NO: 184076 - DNA, 17 bp, synthetic construct
  source 1..17: mol_type = other DNA
tgaggcaggcggtctgg

SEQ ID NO: 184077 - DNA, 17 bp, synthetic construct
  source 1..17: mol_type = other DNA
gtgaggcaggcggtctg

SEQ ID NO: 184078 - DNA, 17 bp, synthetic construct
  source 1..17: mol_type = other DNA
cgtgaggcaggcggtct

SEQ ID NO: 184079 - DNA, 17 bp, synthetic construct
  source 1..17: mol_type = other DNA
gcgtgaggcaggcggtc

SEQ ID NO: 184080 - DNA, 17 bp, synthetic construct
  source 1..17: mol_type = other DNA
ggcgtgaggcaggcggt

SEQ ID NO: 184081 - DNA, 17 bp, synthetic construct
  source 1..17: mol_type = other DNA
gggcgtgaggcaggcgg

SEQ ID NO: 184082 - DNA, 17 bp, synthetic construct
  source 1..17: mol_type = other DNA
cgggcgtgaggcaggcg

SEQ ID NO: 184083 - DNA, 17 bp, synthetic construct
  source 1..17: mol_type = other DNA
tcgggcgtgaggcaggc

SEQ ID NO: 184084 - DNA, 17 bp, synthetic construct
  source 1..17: mol_type = other DNA
atcgggcgtgaggcagg

SEQ ID NO: 184085 - DNA, 17 bp, synthetic construct
  source 1..17: mol_type = other DNA
catcgggcgtgaggcag

SEQ ID NO: 184086 - DNA, 17 bp, synthetic construct
  source 1..17: mol_type = other DNA
ccatcgggcgtgaggca

SEQ ID NO: 184087 - DNA, 17 bp, synthetic construct
  source 1..17: mol_type = other DNA
gccatcgggcgtgaggc

SEQ ID NO: 184088 - DNA, 17 bp, synthetic construct
  source 1..17: mol_type = other DNA
ggccatcgggcgtgagg

SEQ ID NO: 184089 - DNA, 17 bp, synthetic construct
  source 1..17: mol_type = other DNA
tggccatcgggcgtgag

SEQ ID NO: 184090 - DNA, 17 bp, synthetic construct
  source 1..17: mol_type = other DNA
ctggccatcgggcgtga

SEQ ID NO: 184091 - DNA, 17 bp, synthetic construct
  source 1..17: mol_type = other DNA
gctggccatcgggcgtg

SEQ ID NO: 184092 - DNA, 17 bp, synthetic construct
  source 1..17: mol_type = other DNA
ggctggccatcgggcgt

SEQ ID NO: 184093 - DNA, 17 bp, synthetic construct
  source 1..17: mol_type = other DNA
tggctggccatcgggcg

SEQ ID NO: 184094 - DNA, 17 bp, synthetic construct
  source 1..17: mol_type = other DNA
ctggctggccatcgggc

SEQ ID NO: 184095 - DNA, 17 bp, synthetic construct
  source 1..17: mol_type = other DNA
actggctggccatcggg

SEQ ID NO: 184096 - DNA, 17 bp, synthetic construct
  source 1..17: mol_type = other DNA
gactggctggccatcgg

SEQ ID NO: 184097 - DNA, 17 bp, synthetic construct
  source 1..17: mol_type = other DNA
ggactggctggccatcg

SEQ ID NO: 184098 - DNA, 17 bp, synthetic construct
  source 1..17: mol_type = other DNA
tggactggctggccatc

SEQ ID NO: 184099 - DNA, 17 bp, synthetic construct
  source 1..17: mol_type = other DNA
ctggactggctggccat

SEQ ID NO: 184100 - DNA, 17 bp, synthetic construct
  source 1..17: mol_type = other DNA
cctggactggctggcca

SEQ ID NO: 184101 - DNA, 17 bp, synthetic construct
  source 1..17: mol_type = other DNA
acctggactggctggcc

SEQ ID NO: 184102 - DNA, 17 bp, synthetic construct
  source 1..17: mol_type = other DNA
tacctggactggctggc

SEQ ID NO: 184103 - DNA, 17 bp, synthetic construct
  source 1..17: mol_type = other DNA
ttacctggactggctgg

SEQ ID NO: 184104 - DNA, 17 bp, synthetic construct
  source 1..17: mol_type = other DNA
gttacctggactggctg

SEQ ID NO: 184105 - DNA, 17 bp, synthetic construct
  source 1..17: mol_type = other DNA
tgttacctggactggct

SEQ ID NO: 184106 - DNA, 17 bp, synthetic construct
  source 1..17: mol_type = other DNA
ctgttacctggactggc

SEQ ID NO: 184107 - DNA, 17 bp, synthetic construct
  source 1..17: mol_type = other DNA
gctgttacctggactgg

SEQ ID NO: 184108 - DNA, 17 bp, synthetic construct
  source 1..17: mol_type = other DNA
tgctgttacctggactg

SEQ ID NO: 184109 - DNA, 17 bp, synthetic construct
  source 1..17: mol_type = other DNA
ctgctgttacctggact

SEQ ID NO: 184110 - DNA, 17 bp, synthetic construct
  source 1..17: mol_type = other DNA
tctgctgttacctggac

SEQ ID NO: 184111 - DNA, 17 bp, synthetic construct
  source 1..17: mol_type = other DNA
ctctgctgttacctgga

SEQ ID NO: 184112 - DNA, 17 bp, synthetic construct
  source 1..17: mol_type = other DNA
cctctgctgttacctgg

SEQ ID NO: 184113 - DNA, 17 bp, synthetic construct
  source 1..17: mol_type = other DNA
gcctctgctgttacctg

SEQ ID NO: 184114 - DNA, 17 bp, synthetic construct
  source 1..17: mol_type = other DNA
tgcctctgctgttacct

SEQ ID NO: 184115 - DNA, 17 bp, synthetic construct
  source 1..17: mol_type = other DNA
atgcctctgctgttacc

SEQ ID NO: 184116 - DNA, 17 bp, synthetic construct
  source 1..17: mol_type = other DNA
catgcctctgctgttac

SEQ ID NO: 184117 - DNA, 17 bp, synthetic construct
  source 1..17: mol_type = other DNA
acatgcctctgctgtta

SEQ ID NO: 184118 - DNA, 17 bp, synthetic construct
  source 1..17: mol_type = other DNA
cacatgcctctgctgtt

SEQ ID NO: 184119 - DNA, 17 bp, synthetic construct
  source 1..17: mol_type = other DNA
ccacatgcctctgctgt

SEQ ID NO: 184120 - DNA, 17 bp, synthetic construct
  source 1..17: mol_type = other DNA
cccacatgcctctgctg

SEQ ID NO: 184121 - DNA, 17 bp, synthetic construct
  source 1..17: mol_type = other DNA
ccccacatgcctctgct

SEQ ID NO: 184122 - DNA, 17 bp, synthetic construct
  source 1..17: mol_type = other DNA
cccccacatgcctctgc

SEQ ID NO: 184123 - DNA, 17 bp, synthetic construct
  source 1..17: mol_type = other DNA
gcccccacatgcctctg

SEQ ID NO: 184124 - DNA, 17 bp, synthetic construct
  source 1..17: mol_type = other DNA
tgcccccacatgcctct

SEQ ID NO: 184125 - DNA, 17 bp, synthetic construct
  source 1..17: mol_type = other DNA
ctgcccccacatgcctc

SEQ ID NO: 184126 - DNA, 17 bp, synthetic construct
  source 1..17: mol_type = other DNA
cctgcccccacatgcct

SEQ ID NO: 184127 - DNA, 17 bp, synthetic construct
  source 1..17: mol_type = other DNA
acctgcccccacatgcc

SEQ ID NO: 184128 - DNA, 17 bp, synthetic construct
  source 1..17: mol_type = other DNA
gacctgcccccacatgc

SEQ ID NO: 184129 - DNA, 17 bp, synthetic construct
  source 1..17: mol_type = other DNA
agacctgcccccacatg

SEQ ID NO: 184130 - DNA, 17 bp, synthetic construct
  source 1..17: mol_type = other DNA
gagacctgcccccacat

SEQ ID NO: 184131 - DNA, 17 bp, synthetic construct
  source 1..17: mol_type = other DNA
tgagacctgcccccaca

SEQ ID NO: 184132 - DNA, 17 bp, synthetic construct
  source 1..17: mol_type = other DNA
ctgagacctgcccccac

SEQ ID NO: 184133 - DNA, 17 bp, synthetic construct
  source 1..17: mol_type = other DNA
gctgagacctgccccca

SEQ ID NO: 184134 - DNA, 17 bp, synthetic construct
  source 1..17: mol_type = other DNA
agctgagacctgccccc

SEQ ID NO: 184135 - DNA, 17 bp, synthetic construct
  source 1..17: mol_type = other DNA
gagctgagacctgcccc

SEQ ID NO: 184136 - DNA, 17 bp, synthetic construct
  source 1..17: mol_type = other DNA
ggagctgagacctgccc

SEQ ID NO: 184137 - DNA, 17 bp, synthetic construct
  source 1..17: mol_type = other DNA
gggagctgagacctgcc

SEQ ID NO: 184138 - DNA, 17 bp, synthetic construct
  source 1..17: mol_type = other DNA
agggagctgagacctgc

SEQ ID NO: 184139 - DNA, 17 bp, synthetic construct
  source 1..17: mol_type = other DNA
gagggagctgagacctg

SEQ ID NO: 184140 - DNA, 17 bp, synthetic construct
  source 1..17: mol_type = other DNA
ggagggagctgagacct

SEQ ID NO: 184141 - DNA, 17 bp, synthetic construct
  source 1..17: mol_type = other DNA
gggagggagctgagacc

SEQ ID NO: 184142 - DNA, 17 bp, synthetic construct
  source 1..17: mol_type = other DNA
agggagggagctgagac

SEQ ID NO: 184143 - DNA, 17 bp, synthetic construct
  source 1..17: mol_type = other DNA
cagggagggagctgaga

SEQ ID NO: 184144 - DNA, 17 bp, synthetic construct
  source 1..17: mol_type = other DNA
ccagggagggagctgag

SEQ ID NO: 184145 - DNA, 17 bp, synthetic construct
  source 1..17: mol_type = other DNA
tccagggagggagctga

SEQ ID NO: 184146 - DNA, 17 bp, synthetic construct
  source 1..17: mol_type = other DNA
ctccagggagggagctg

SEQ ID NO: 184147 - DNA, 17 bp, synthetic construct
  source 1..17: mol_type = other DNA
tctccagggagggagct

SEQ ID NO: 184148 - DNA, 17 bp, synthetic construct
  source 1..17: mol_type = other DNA
gtctccagggagggagc

SEQ ID NO: 184149 - DNA, 17 bp, synthetic construct
  source 1..17: mol_type = other DNA
ggtctccagggagggag

SEQ ID NO: 184150 - DNA, 17 bp, synthetic construct
  source 1..17: mol_type = other DNA
gggtctccagggaggga

SEQ ID NO: 184151 - DNA, 17 bp, synthetic construct
  source 1..17: mol_type = other DNA
agggtctccagggaggg

SEQ ID NO: 184152 - DNA, 17 bp, synthetic construct
  source 1..17: mol_type = other DNA
gagggtctccagggagg

SEQ ID NO: 184153 - DNA, 17 bp, synthetic construct
  source 1..17: mol_type = other DNA
tgagggtctccagggag

SEQ ID NO: 184154 - DNA, 17 bp, synthetic construct
  source 1..17: mol_type = other DNA
gtgagggtctccaggga

SEQ ID NO: 184155 - DNA, 17 bp, synthetic construct
  source 1..17: mol_type = other DNA
ggtgagggtctccaggg

SEQ ID NO: 184156 - DNA, 17 bp, synthetic construct
  source 1..17: mol_type = other DNA
gggtgagggtctccagg

SEQ ID NO: 184157 - DNA, 17 bp, synthetic construct
  source 1..17: mol_type = other DNA
ggggtgagggtctccag

SEQ ID NO: 184158 - DNA, 17 bp, synthetic construct
  source 1..17: mol_type = other DNA
gggggtgagggtctcca

SEQ ID NO: 184159 - DNA, 17 bp, synthetic construct
  source 1..17: mol_type = other DNA
tgggggtgagggtctcc

SEQ ID NO: 184160 - DNA, 17 bp, synthetic construct
  source 1..17: mol_type = other DNA
ttgggggtgagggtctc

SEQ ID NO: 184161 - DNA, 17 bp, synthetic construct
  source 1..17: mol_type = other DNA
attgggggtgagggtct

SEQ ID NO: 184162 - DNA, 17 bp, synthetic construct
  source 1..17: mol_type = other DNA
cattgggggtgagggtc

SEQ ID NO: 184163 - DNA, 17 bp, synthetic construct
  source 1..17: mol_type = other DNA
ccattgggggtgagggt

SEQ ID NO: 184164 - DNA, 17 bp, synthetic construct
  source 1..17: mol_type = other DNA
cccattgggggtgaggg

SEQ ID NO: 184165 - DNA, 17 bp, synthetic construct
  source 1..17: mol_type = other DNA
ccccattgggggtgagg

SEQ ID NO: 184166 - DNA, 17 bp, synthetic construct
  source 1..17: mol_type = other DNA
gccccattgggggtgag

SEQ ID NO: 184167 - DNA, 17 bp, synthetic construct
  source 1..17: mol_type = other DNA
agccccattgggggtga

SEQ ID NO: 184168 - DNA, 17 bp, synthetic construct
  source 1..17: mol_type = other DNA
gagccccattgggggtg

SEQ ID NO: 184169 - DNA, 17 bp, synthetic construct
  source 1..17: mol_type = other DNA
agagccccattgggggt

SEQ ID NO: 184170 - DNA, 17 bp, synthetic construct
  source 1..17: mol_type = other DNA
cagagccccattggggg

SEQ ID NO: 184171 - DNA, 17 bp, synthetic construct
  source 1..17: mol_type = other DNA
gcagagccccattgggg

SEQ ID NO: 184172 - DNA, 17 bp, synthetic construct
  source 1..17: mol_type = other DNA
tgcagagccccattggg

SEQ ID NO: 184173 - DNA, 17 bp, synthetic construct
  source 1..17: mol_type = other DNA
gtgcagagccccattgg

SEQ ID NO: 184174 - DNA, 17 bp, synthetic construct
  source 1..17: mol_type = other DNA
tgtgcagagccccattg

SEQ ID NO: 184175 - DNA, 17 bp, synthetic construct
  source 1..17: mol_type = other DNA
ttgtgcagagccccatt

SEQ ID NO: 184176 - DNA, 17 bp, synthetic construct
  source 1..17: mol_type = other DNA
cttgtgcagagccccat

SEQ ID NO: 184177 - DNA, 17 bp, synthetic construct
  source 1..17: mol_type = other DNA
tcttgtgcagagcccca

SEQ ID NO: 184178 - DNA, 17 bp, synthetic construct
  source 1..17: mol_type = other DNA
ctcttgtgcagagcccc

SEQ ID NO: 184179 - DNA, 17 bp, synthetic construct
  source 1..17: mol_type = other DNA
cctcttgtgcagagccc

SEQ ID NO: 184180 - DNA, 17 bp, synthetic construct
  source 1..17: mol_type = other DNA
acctcttgtgcagagcc

SEQ ID NO: 184181 - DNA, 17 bp, synthetic construct
  source 1..17: mol_type = other DNA
tacctcttgtgcagagc

SEQ ID NO: 184182 - DNA, 17 bp, synthetic construct
  source 1..17: mol_type = other DNA
ttacctcttgtgcagag

SEQ ID NO: 184183 - DNA, 17 bp, synthetic construct
  source 1..17: mol_type = other DNA
attacctcttgtgcaga

SEQ ID NO: 184184 - DNA, 17 bp, synthetic construct
  source 1..17: mol_type = other DNA
gattacctcttgtgcag

SEQ ID NO: 184185 - DNA, 17 bp, synthetic construct
  source 1..17: mol_type = other DNA
ggattacctcttgtgca

SEQ ID NO: 184186 - DNA, 17 bp, synthetic construct
  source 1..17: mol_type = other DNA
gggattacctcttgtgc

SEQ ID NO: 184187 - DNA, 17 bp, synthetic construct
  source 1..17: mol_type = other DNA
agggattacctcttgtg

SEQ ID NO: 184188 - DNA, 17 bp, synthetic construct
  source 1..17: mol_type = other DNA
tagggattacctcttgt

SEQ ID NO: 184189 - DNA, 17 bp, synthetic construct
  source 1..17: mol_type = other DNA
gtagggattacctcttg

SEQ ID NO: 184190 - DNA, 17 bp, synthetic construct
  source 1..17: mol_type = other DNA
agtagggattacctctt

SEQ ID NO: 184191 - DNA, 17 bp, synthetic construct
  source 1..17: mol_type = other DNA
gagtagggattacctct

SEQ ID NO: 184192 - DNA, 17 bp, synthetic construct
  source 1..17: mol_type = other DNA
tgagtagggattacctc

SEQ ID NO: 184193 - DNA, 17 bp, synthetic construct
  source 1..17: mol_type = other DNA
ctgagtagggattacct

SEQ ID NO: 184194 - DNA, 17 bp, synthetic construct
  source 1..17: mol_type = other DNA
gctgagtagggattacc

SEQ ID NO: 184195 - DNA, 17 bp, synthetic construct
  source 1..17: mol_type = other DNA
agctgagtagggattac

SEQ ID NO: 184196 - DNA, 17 bp, synthetic construct
  source 1..17: mol_type = other DNA
aagctgagtagggatta

SEQ ID NO: 184197 - DNA, 17 bp, synthetic construct
  source 1..17: mol_type = other DNA
gaagctgagtagggatt

SEQ ID NO: 184198 - DNA, 17 bp, synthetic construct
  source 1..17: mol_type = other DNA
ggaagctgagtagggat

SEQ ID NO: 184199 - DNA, 17 bp, synthetic construct
  source 1..17: mol_type = other DNA
tggaagctgagtaggga

SEQ ID NO: 184200 - DNA, 17 bp, synthetic construct
  source 1..17: mol_type = other DNA
gtggaagctgagtaggg

SEQ ID NO: 184201 - DNA, 17 bp, synthetic construct
  source 1..17: mol_type = other DNA
tgtggaagctgagtagg

SEQ ID NO: 184202 - DNA, 17 bp, synthetic construct
  source 1..17: mol_type = other DNA
gtgtggaagctgagtag

SEQ ID NO: 184203 - DNA, 17 bp, synthetic construct
  source 1..17: mol_type = other DNA
agtgtggaagctgagta

SEQ ID NO: 184204 - DNA, 17 bp, synthetic construct
  source 1..17: mol_type = other DNA
gagtgtggaagctgagt

SEQ ID NO: 184205 - DNA, 17 bp, synthetic construct
  source 1..17: mol_type = other DNA
tgagtgtggaagctgag

SEQ ID NO: 184206 - DNA, 17 bp, synthetic construct
  source 1..17: mol_type = other DNA
gtgagtgtggaagctga

SEQ ID NO: 184207 - DNA, 17 bp, synthetic construct
  source 1..17: mol_type = other DNA
ggtgagtgtggaagctg

SEQ ID NO: 184208 - DNA, 17 bp, synthetic construct
  source 1..17: mol_type = other DNA
gggtgagtgtggaagct

SEQ ID NO: 184209 - DNA, 17 bp, synthetic construct
  source 1..17: mol_type = other DNA
agggtgagtgtggaagc

SEQ ID NO: 184210 - DNA, 17 bp, synthetic construct
  source 1..17: mol_type = other DNA
aagggtgagtgtggaag

SEQ ID NO: 184211 - DNA, 17 bp, synthetic construct
  source 1..17: mol_type = other DNA
caagggtgagtgtggaa

SEQ ID NO: 184212 - DNA, 17 bp, synthetic construct
  source 1..17: mol_type = other DNA
gcaagggtgagtgtgga

SEQ ID NO: 184213 - DNA, 17 bp, synthetic construct
  source 1..17: mol_type = other DNA
tgcaagggtgagtgtgg

SEQ ID NO: 184214 - DNA, 17 bp, synthetic construct
  source 1..17: mol_type = other DNA
atgcaagggtgagtgtg

SEQ ID NO: 184215 - DNA, 17 bp, synthetic construct
  source 1..17: mol_type = other DNA
aatgcaagggtgagtgt

SEQ ID NO: 184216 - DNA, 17 bp, synthetic construct
  source 1..17: mol_type = other DNA
aaatgcaagggtgagtg

SEQ ID NO: 184217 - DNA, 17 bp, synthetic construct
  source 1..17: mol_type = other DNA
gaaatgcaagggtgagt

SEQ ID NO: 184218 - DNA, 17 bp, synthetic construct
  source 1..17: mol_type = other DNA
tgaaatgcaagggtgag

SEQ ID NO: 184219 - DNA, 17 bp, synthetic construct
  source 1..17: mol_type = other DNA
ctgaaatgcaagggtga

SEQ ID NO: 184220 - DNA, 17 bp, synthetic construct
  source 1..17: mol_type = other DNA
gctgaaatgcaagggtg

SEQ ID NO: 184221 - DNA, 17 bp, synthetic construct
  source 1..17: mol_type = other DNA
agctgaaatgcaagggt

SEQ ID NO: 184222 - DNA, 17 bp, synthetic construct
  source 1..17: mol_type = other DNA
cagctgaaatgcaaggg

SEQ ID NO: 184223 - DNA, 17 bp, synthetic construct
  source 1..17: mol_type = other DNA
tcagctgaaatgcaagg

SEQ ID NO: 184224 - DNA, 17 bp, synthetic construct
  source 1..17: mol_type = other DNA
ttcagctgaaatgcaag

SEQ ID NO: 184225 - DNA, 17 bp, synthetic construct
  source 1..17: mol_type = other DNA
attcagctgaaatgcaa

SEQ ID NO: 184226 - DNA, 17 bp, synthetic construct
  source 1..17: mol_type = other DNA
cattcagctgaaatgca

SEQ ID NO: 184227 - DNA, 17 bp, synthetic construct
  source 1..17: mol_type = other DNA
tcattcagctgaaatgc

SEQ ID NO: 184228 - DNA, 17 bp, synthetic construct
  source 1..17: mol_type = other DNA
ttcattcagctgaaatg

SEQ ID NO: 184229 - DNA, 17 bp, synthetic construct
  source 1..17: mol_type = other DNA
tttcattcagctgaaat

SEQ ID NO: 184230 - DNA, 17 bp, synthetic construct
  source 1..17: mol_type = other DNA
gtttcattcagctgaaa

SEQ ID NO: 184231 - DNA, 17 bp, synthetic construct
  source 1..17: mol_type = other DNA
ggtttcattcagctgaa

SEQ ID NO: 184232 - DNA, 17 bp, synthetic construct
  source 1..17: mol_type = other DNA
aggtttcattcagctga

SEQ ID NO: 184233 - DNA, 17 bp, synthetic construct
  source 1..17: mol_type = other DNA
caggtttcattcagctg

SEQ ID NO: 184234 - DNA, 17 bp, synthetic construct
  source 1..17: mol_type = other DNA
ccaggtttcattcagct

SEQ ID NO: 184235 - DNA, 17 bp, synthetic construct
  source 1..17: mol_type = other DNA
cccaggtttcattcagc

SEQ ID NO: 184236 - DNA, 17 bp, synthetic construct
  source 1..17: mol_type = other DNA
acccaggtttcattcag

SEQ ID NO: 184237 - DNA, 17 bp, synthetic construct
  source 1..17: mol_type = other DNA
gacccaggtttcattca

SEQ ID NO: 184238 - DNA, 17 bp, synthetic construct
  source 1..17: mol_type = other DNA
tgacccaggtttcattc

SEQ ID NO: 184239 - DNA, 17 bp, synthetic construct
  source 1..17: mol_type = other DNA
ttgacccaggtttcatt

SEQ ID NO: 184240 - DNA, 17 bp, synthetic construct
  source 1..17: mol_type = other DNA
gttgacccaggtttcat

SEQ ID NO: 184241 - DNA, 17 bp, synthetic construct
  source 1..17: mol_type = other DNA
tgttgacccaggtttca

SEQ ID NO: 184242 - DNA, 17 bp, synthetic construct
  source 1..17: mol_type = other DNA
ctgttgacccaggtttc

SEQ ID NO: 184243 - DNA, 17 bp, synthetic construct
  source 1..17: mol_type = other DNA
gctgttgacccaggttt

SEQ ID NO: 184244 - DNA, 17 bp, synthetic construct
  source 1..17: mol_type = other DNA
ggctgttgacccaggtt

SEQ ID NO: 184245 - DNA, 17 bp, synthetic construct
  source 1..17: mol_type = other DNA
tggctgttgacccaggt

SEQ ID NO: 184246 - DNA, 17 bp, synthetic construct
  source 1..17: mol_type = other DNA
atggctgttgacccagg

SEQ ID NO: 184247 - DNA, 17 bp, synthetic construct
  source 1..17: mol_type = other DNA
catggctgttgacccag

SEQ ID NO: 184248 - DNA, 17 bp, synthetic construct
  source 1..17: mol_type = other DNA
acatggctgttgaccca

SEQ ID NO: 184249 - DNA, 17 bp, synthetic construct
  source 1..17: mol_type = other DNA
cacatggctgttgaccc

SEQ ID NO: 184250 - DNA, 17 bp, synthetic construct
  source 1..17: mol_type = other DNA
ccacatggctgttgacc

SEQ ID NO: 184251 - DNA, 17 bp, synthetic construct
  source 1..17: mol_type = other DNA
tccacatggctgttgac

SEQ ID NO: 184252 - DNA, 17 bp, synthetic construct
  source 1..17: mol_type = other DNA
gtccacatggctgttga

SEQ ID NO: 184253 - DNA, 17 bp, synthetic construct
  source 1..17: mol_type = other DNA
tgtccacatggctgttg

SEQ ID NO: 184254 - DNA, 17 bp, synthetic construct
  source 1..17: mol_type = other DNA
ttgtccacatggctgtt

SEQ ID NO: 184255 - DNA, 17 bp, synthetic construct
  source 1..17: mol_type = other DNA
gttgtccacatggctgt

SEQ ID NO: 184256 - DNA, 17 bp, synthetic construct
  source 1..17: mol_type = other DNA
agttgtccacatggctg

SEQ ID NO: 184257 - DNA, 17 bp, synthetic construct
  source 1..17: mol_type = other DNA
cagttgtccacatggct

SEQ ID NO: 184258 - DNA, 17 bp, synthetic construct
  source 1..17: mol_type = other DNA
gcagttgtccacatggc

SEQ ID NO: 184259 - DNA, 17 bp, synthetic construct
  source 1..17: mol_type = other DNA
tgcagttgtccacatgg

SEQ ID NO: 184260 - DNA, 17 bp, synthetic construct
  source 1..17: mol_type = other DNA
gtgcagttgtccacatg

SEQ ID NO: 184261 - DNA, 17 bp, synthetic construct
  source 1..17: mol_type = other DNA
ggtgcagttgtccacat

SEQ ID NO: 184262 - DNA, 17 bp, synthetic construct
  source 1..17: mol_type = other DNA
cggtgcagttgtccaca

SEQ ID NO: 184263 - DNA, 17 bp, synthetic construct
  source 1..17: mol_type = other DNA
acggtgcagttgtccac

SEQ ID NO: 184264 - DNA, 17 bp, synthetic construct
  source 1..17: mol_type = other DNA
cacggtgcagttgtcca

SEQ ID NO: 184265 - DNA, 17 bp, synthetic construct
  source 1..17: mol_type = other DNA
acacggtgcagttgtcc

SEQ ID NO: 184266 - DNA, 17 bp, synthetic construct
  source 1..17: mol_type = other DNA
tacacggtgcagttgtc

SEQ ID NO: 184267 - DNA, 17 bp, synthetic construct
  source 1..17: mol_type = other DNA
gtacacggtgcagttgt

SEQ ID NO: 184268 - DNA, 17 bp, synthetic construct
  source 1..17: mol_type = other DNA
ggtacacggtgcagttg

SEQ ID NO: 184269 - DNA, 17 bp, synthetic construct
  source 1..17: mol_type = other DNA
aggtacacggtgcagtt

SEQ ID NO: 184270 - DNA, 17 bp, synthetic construct
  source 1..17: mol_type = other DNA
gaggtacacggtgcagt

SEQ ID NO: 184271 - DNA, 17 bp, synthetic construct
  source 1..17: mol_type = other DNA
agaggtacacggtgcag

SEQ ID NO: 184272 - DNA, 17 bp, synthetic construct
  source 1..17: mol_type = other DNA
cagaggtacacggtgca

SEQ ID NO: 184273 - DNA, 17 bp, synthetic construct
  source 1..17: mol_type = other DNA
acagaggtacacggtgc

SEQ ID NO: 184274 - DNA, 17 bp, synthetic construct
  source 1..17: mol_type = other DNA
cacagaggtacacggtg

SEQ ID NO: 184275 - DNA, 17 bp, synthetic construct
  source 1..17: mol_type = other DNA
tcacagaggtacacggt

SEQ ID NO: 184276 - DNA, 17 bp, synthetic construct
  source 1..17: mol_type = other DNA
ctcacagaggtacacgg

SEQ ID NO: 184277 - DNA, 17 bp, synthetic construct
  source 1..17: mol_type = other DNA
cctcacagaggtacacg

SEQ ID NO: 184278 - DNA, 17 bp, synthetic construct
  source 1..17: mol_type = other DNA
gcctcacagaggtacac

SEQ ID NO: 184279 - DNA, 17 bp, synthetic construct
  source 1..17: mol_type = other DNA
agcctcacagaggtaca

SEQ ID NO: 184280 - DNA, 17 bp, synthetic construct
  source 1..17: mol_type = other DNA
cagcctcacagaggtac

SEQ ID NO: 184281 - DNA, 17 bp, synthetic construct
  source 1..17: mol_type = other DNA
tcagcctcacagaggta

SEQ ID NO: 184282 - DNA, 17 bp, synthetic construct
  source 1..17: mol_type = other DNA
ctcagcctcacagaggt

SEQ ID NO: 184283 - DNA, 17 bp, synthetic construct
  source 1..17: mol_type = other DNA
cctcagcctcacagagg

SEQ ID NO: 184284 - DNA, 17 bp, synthetic construct
  source 1..17: mol_type = other DNA
ccctcagcctcacagag

SEQ ID NO: 184285 - DNA, 17 bp, synthetic construct
  source 1..17: mol_type = other DNA
accctcagcctcacaga

SEQ ID NO: 184286 - DNA, 17 bp, synthetic construct
  source 1..17: mol_type = other DNA
caccctcagcctcacag

SEQ ID NO: 184287 - DNA, 17 bp, synthetic construct
  source 1..17: mol_type = other DNA
ccaccctcagcctcaca

SEQ ID NO: 184288 - DNA, 17 bp, synthetic construct
  source 1..17: mol_type = other DNA
tccaccctcagcctcac

SEQ ID NO: 184289 - DNA, 17 bp, synthetic construct
  source 1..17: mol_type = other DNA
ctccaccctcagcctca

SEQ ID NO: 184290 - DNA, 17 bp, synthetic construct
  source 1..17: mol_type = other DNA
actccaccctcagcctc

SEQ ID NO: 184291 - DNA, 17 bp, synthetic construct
  source 1..17: mol_type = other DNA
gactccaccctcagcct

SEQ ID NO: 184292 - DNA, 17 bp, synthetic construct
  source 1..17: mol_type = other DNA
ggactccaccctcagcc

SEQ ID NO: 184293 - DNA, 17 bp, synthetic construct
  source 1..17: mol_type = other DNA
tggactccaccctcagc

SEQ ID NO: 184294 - DNA, 17 bp, synthetic construct
  source 1..17: mol_type = other DNA
atggactccaccctcag

SEQ ID NO: 184295 - DNA, 17 bp, synthetic construct
  source 1..17: mol_type = other DNA
aatggactccaccctca

SEQ ID NO: 184296 - DNA, 17 bp, synthetic construct
  source 1..17: mol_type = other DNA
aaatggactccaccctc

SEQ ID NO: 184297 - DNA, 17 bp, synthetic construct
  source 1..17: mol_type = other DNA
caaatggactccaccct

SEQ ID NO: 184298 - DNA, 17 bp, synthetic construct
  source 1..17: mol_type = other DNA
gcaaatggactccaccc

SEQ ID NO: 184299 - DNA, 17 bp, synthetic construct
  source 1..17: mol_type = other DNA
agcaaatggactccacc

SEQ ID NO: 184300 - DNA, 17 bp, synthetic construct
  source 1..17: mol_type = other DNA
cagcaaatggactccac

SEQ ID NO: 184301 - DNA, 17 bp, synthetic construct
  source 1..17: mol_type = other DNA
tcagcaaatggactcca

SEQ ID NO: 184302 - DNA, 17 bp, synthetic construct
  source 1..17: mol_type = other DNA
gtcagcaaatggactcc

SEQ ID NO: 184303 - DNA, 17 bp, synthetic construct
  source 1..17: mol_type = other DNA
ggtcagcaaatggactc

SEQ ID NO: 184304 - DNA, 17 bp, synthetic construct
  source 1..17: mol_type = other DNA
gggtcagcaaatggact

SEQ ID NO: 184305 - DNA, 17 bp, synthetic construct
  source 1..17: mol_type = other DNA
ggggtcagcaaatggac

SEQ ID NO: 184306 - DNA, 17 bp, synthetic construct
  source 1..17: mol_type = other DNA
tggggtcagcaaatgga

SEQ ID NO: 184307 - DNA, 17 bp, synthetic construct
  source 1..17: mol_type = other DNA
gtggggtcagcaaatgg

SEQ ID NO: 184308 - DNA, 17 bp, synthetic construct
  source 1..17: mol_type = other DNA
tgtggggtcagcaaatg

SEQ ID NO: 184309 - DNA, 17 bp, synthetic construct
  source 1..17: mol_type = other DNA
ctgtggggtcagcaaat

SEQ ID NO: 184310 - DNA, 17 bp, synthetic construct
  source 1..17: mol_type = other DNA
gctgtggggtcagcaaa

SEQ ID NO: 184311 - DNA, 17 bp, synthetic construct
  source 1..17: mol_type = other DNA
ggctgtggggtcagcaa

SEQ ID NO: 184312 - DNA, 17 bp, synthetic construct
  source 1..17: mol_type = other DNA
aggctgtggggtcagca

SEQ ID NO: 184313 - DNA, 17 bp, synthetic construct
  source 1..17: mol_type = other DNA
caggctgtggggtcagc

SEQ ID NO: 184314 - DNA, 17 bp, synthetic construct
  source 1..17: mol_type = other DNA
gcaggctgtggggtcag

SEQ ID NO: 184315 - DNA, 17 bp, synthetic construct
  source 1..17: mol_type = other DNA
tgcaggctgtggggtca

SEQ ID NO: 184316 - DNA, 17 bp, synthetic construct
  source 1..17: mol_type = other DNA
atgcaggctgtggggtc

SEQ ID NO: 184317 - DNA, 17 bp, synthetic construct
  source 1..17: mol_type = other DNA
gatgcaggctgtggggt

SEQ ID NO: 184318 - DNA, 17 bp, synthetic construct
  source 1..17: mol_type = other DNA
ggatgcaggctgtgggg

SEQ ID NO: 184319 - DNA, 17 bp, synthetic construct
  source 1..17: mol_type = other DNA
aggatgcaggctgtggg

SEQ ID NO: 184320 - DNA, 17 bp, synthetic construct
  source 1..17: mol_type = other DNA
caggatgcaggctgtgg

SEQ ID NO: 184321 - DNA, 17 bp, synthetic construct
  source 1..17: mol_type = other DNA
gcaggatgcaggctgtg

SEQ ID NO: 184322 - DNA, 17 bp, synthetic construct
  source 1..17: mol_type = other DNA
ggcaggatgcaggctgt

SEQ ID NO: 184323 - DNA, 17 bp, synthetic construct
  source 1..17: mol_type = other DNA
gggcaggatgcaggctg

SEQ ID NO: 184324 - DNA, 17 bp, synthetic construct
  source 1..17: mol_type = other DNA
tgggcaggatgcaggct

SEQ ID NO: 184325 - DNA, 17 bp, synthetic construct
  source 1..17: mol_type = other DNA
ctgggcaggatgcaggc

SEQ ID NO: 184326 - DNA, 17 bp, synthetic construct
  source 1..17: mol_type = other DNA
tctgggcaggatgcagg

SEQ ID NO: 184327 - DNA, 17 bp, synthetic construct
  source 1..17: mol_type = other DNA
atctgggcaggatgcag

SEQ ID NO: 184328 - DNA, 17 bp, synthetic construct
  source 1..17: mol_type = other DNA
catctgggcaggatgca

SEQ ID NO: 184329 - DNA, 17 bp, synthetic construct
  source 1..17: mol_type = other DNA
acatctgggcaggatgc

SEQ ID NO: 184330 - DNA, 17 bp, synthetic construct
  source 1..17: mol_type = other DNA
cacatctgggcaggatg

SEQ ID NO: 184331 - DNA, 17 bp, synthetic construct
  source 1..17: mol_type = other DNA
acacatctgggcaggat

SEQ ID NO: 184332 - DNA, 17 bp, synthetic construct
  source 1..17: mol_type = other DNA
gacacatctgggcagga

SEQ ID NO: 184333 - DNA, 17 bp, synthetic construct
  source 1..17: mol_type = other DNA
ggacacatctgggcagg

SEQ ID NO: 184334 - DNA, 17 bp, synthetic construct
  source 1..17: mol_type = other DNA
tggacacatctgggcag

SEQ ID NO: 184335 - DNA, 17 bp, synthetic construct
  source 1..17: mol_type = other DNA
ctggacacatctgggca

SEQ ID NO: 184336 - DNA, 17 bp, synthetic construct
  source 1..17: mol_type = other DNA
gctggacacatctgggc

SEQ ID NO: 184337 - DNA, 17 bp, synthetic construct
  source 1..17: mol_type = other DNA
agctggacacatctggg

SEQ ID NO: 184338 - DNA, 17 bp, synthetic construct
  source 1..17: mol_type = other DNA
cagctggacacatctgg

SEQ ID NO: 184339 - DNA, 17 bp, synthetic construct
  source 1..17: mol_type = other DNA
gcagctggacacatctg

SEQ ID NO: 184340 - DNA, 17 bp, synthetic construct
  source 1..17: mol_type = other DNA
tgcagctggacacatct

SEQ ID NO: 184341 - DNA, 17 bp, synthetic construct
  source 1..17: mol_type = other DNA
ctgcagctggacacatc

SEQ ID NO: 184342 - DNA, 17 bp, synthetic construct
  source 1..17: mol_type = other DNA
cctgcagctggacacat

SEQ ID NO: 184343 - DNA, 17 bp, synthetic construct
  source 1..17: mol_type = other DNA
ccctgcagctggacaca

SEQ ID NO: 184344 - DNA, 17 bp, synthetic construct
  source 1..17: mol_type = other DNA
accctgcagctggacac

SEQ ID NO: 184345 - DNA, 17 bp, synthetic construct
  source 1..17: mol_type = other DNA
caccctgcagctggaca

SEQ ID NO: 184346 - DNA, 17 bp, synthetic construct
  source 1..17: mol_type = other DNA
acaccctgcagctggac

SEQ ID NO: 184347 - DNA, 17 bp, synthetic construct
  source 1..17: mol_type = other DNA
cacaccctgcagctgga

SEQ ID NO: 184348 - DNA, 17 bp, synthetic construct
  source 1..17: mol_type = other DNA
acacaccctgcagctgg

SEQ ID NO: 184349 - DNA, 17 bp, synthetic construct
  source 1..17: mol_type = other DNA
cacacaccctgcagctg

SEQ ID NO: 184350 - DNA, 17 bp, synthetic construct
  source 1..17: mol_type = other DNA
gcacacaccctgcagct

SEQ ID NO: 184351 - DNA, 17 bp, synthetic construct
  source 1..17: mol_type = other DNA
agcacacaccctgcagc

SEQ ID NO: 184352 - DNA, 17 bp, synthetic construct
  source 1..17: mol_type = other DNA
cagcacacaccctgcag

SEQ ID NO: 184353 - DNA, 17 bp, synthetic construct
  source 1..17: mol_type = other DNA
ccagcacacaccctgca

SEQ ID NO: 184354 - DNA, 17 bp, synthetic construct
  source 1..17: mol_type = other DNA
tccagcacacaccctgc

SEQ ID NO: 184355 - DNA, 17 bp, synthetic construct
  source 1..17: mol_type = other DNA
ctccagcacacaccctg

SEQ ID NO: 184356 - DNA, 17 bp, synthetic construct
  source 1..17: mol_type = other DNA
cctccagcacacaccct

SEQ ID NO: 184357 - DNA, 17 bp, synthetic construct
  source 1..17: mol_type = other DNA
gcctccagcacacaccc

SEQ ID NO: 184358 - DNA, 17 bp, synthetic construct
  source 1..17: mol_type = other DNA
ggcctccagcacacacc

SEQ ID NO: 184359 - DNA, 17 bp, synthetic construct
  source 1..17: mol_type = other DNA
gggcctccagcacacac

SEQ ID NO: 184360 - DNA, 17 bp, synthetic construct
  source 1..17: mol_type = other DNA
agggcctccagcacaca

SEQ ID NO: 184361 - DNA, 17 bp, synthetic construct
  source 1..17: mol_type = other DNA
cagggcctccagcacac

SEQ ID NO: 184362 - DNA, 17 bp, synthetic construct
  source 1..17: mol_type = other DNA
gcagggcctccagcaca

SEQ ID NO: 184363 - DNA, 17 bp, synthetic construct
  source 1..17: mol_type = other DNA
ggcagggcctccagcac

SEQ ID NO: 184364 - DNA, 17 bp, synthetic construct
  source 1..17: mol_type = other DNA
gggcagggcctccagca

SEQ ID NO: 184365 - DNA, 17 bp, synthetic construct
  source 1..17: mol_type = other DNA
ggggcagggcctccagc

SEQ ID NO: 184366 - DNA, 17 bp, synthetic construct
  source 1..17: mol_type = other DNA
aggggcagggcctccag

SEQ ID NO: 184367 - DNA, 17 bp, synthetic construct
  source 1..17: mol_type = other DNA
caggggcagggcctcca

SEQ ID NO: 184368 - DNA, 17 bp, synthetic construct
  source 1..17: mol_type = other DNA
gcaggggcagggcctcc

SEQ ID NO: 184369 - DNA, 17 bp, synthetic construct
  source 1..17: mol_type = other DNA
ggcaggggcagggcctc

SEQ ID NO: 184370 - DNA, 17 bp, synthetic construct
  source 1..17: mol_type = other DNA
aggcaggggcagggcct

SEQ ID NO: 184371 - DNA, 17 bp, synthetic construct
  source 1..17: mol_type = other DNA
caggcaggggcagggcc

SEQ ID NO: 184372 - DNA, 17 bp, synthetic construct
  source 1..17: mol_type = other DNA
ccaggcaggggcagggc

SEQ ID NO: 184373 - DNA, 17 bp, synthetic construct
  source 1..17: mol_type = other DNA
cccaggcaggggcaggg

SEQ ID NO: 184374 - DNA, 17 bp, synthetic construct
  source 1..17: mol_type = other DNA
tcccaggcaggggcagg

SEQ ID NO: 184375 - DNA, 17 bp, synthetic construct
  source 1..17: mol_type = other DNA
ctcccaggcaggggcag

SEQ ID NO: 184376 - DNA, 17 bp, synthetic construct
  source 1..17: mol_type = other DNA
actcccaggcaggggca

SEQ ID NO: 184377 - DNA, 17 bp, synthetic construct
  source 1..17: mol_type = other DNA
gactcccaggcaggggc

SEQ ID NO: 184378 - DNA, 17 bp, synthetic construct
  source 1..17: mol_type = other DNA
ggactcccaggcagggg

SEQ ID NO: 184379 - DNA, 17 bp, synthetic construct
  source 1..17: mol_type = other DNA
aggactcccaggcaggg

SEQ ID NO: 184380 - DNA, 17 bp, synthetic construct
  source 1..17: mol_type = other DNA
aaggactcccaggcagg

SEQ ID NO: 184381 - DNA, 17 bp, synthetic construct
  source 1..17: mol_type = other DNA
caaggactcccaggcag

SEQ ID NO: 184382 - DNA, 17 bp, synthetic construct
  source 1..17: mol_type = other DNA
acaaggactcccaggca

SEQ ID NO: 184383 - DNA, 17 bp, synthetic construct
  source 1..17: mol_type = other DNA
gacaaggactcccaggc

SEQ ID NO: 184384 - DNA, 17 bp, synthetic construct
  source 1..17: mol_type = other DNA
ggacaaggactcccagg

SEQ ID NO: 184385 - DNA, 17 bp, synthetic construct
  source 1..17: mol_type = other DNA
tggacaaggactcccag

SEQ ID NO: 184386 - DNA, 17 bp, synthetic construct
  source 1..17: mol_type = other DNA
atggacaaggactccca

SEQ ID NO: 184387 - DNA, 17 bp, synthetic construct
  source 1..17: mol_type = other DNA
gatggacaaggactccc

SEQ ID NO: 184388 - DNA, 17 bp, synthetic construct
  source 1..17: mol_type = other DNA
tgatggacaaggactcc

SEQ ID NO: 184389 - DNA, 17 bp, synthetic construct
  source 1..17: mol_type = other DNA
ctgatggacaaggactc

SEQ ID NO: 184390 - DNA, 17 bp, synthetic construct
  source 1..17: mol_type = other DNA
cctgatggacaaggact

SEQ ID NO: 184391 - DNA, 17 bp, synthetic construct
  source 1..17: mol_type = other DNA
ccctgatggacaaggac

SEQ ID NO: 184392 - DNA, 17 bp, synthetic construct
  source 1..17: mol_type = other DNA
tccctgatggacaagga

SEQ ID NO: 184393 - DNA, 17 bp, synthetic construct
  source 1..17: mol_type = other DNA
ctccctgatggacaagg

SEQ ID NO: 184394 - DNA, 17 bp, synthetic construct
  source 1..17: mol_type = other DNA
cctccctgatggacaag

SEQ ID NO: 184395 - DNA, 17 bp, synthetic construct
  source 1..17: mol_type = other DNA
gcctccctgatggacaa

SEQ ID NO: 184396 - DNA, 17 bp, synthetic construct
  source 1..17: mol_type = other DNA
ggcctccctgatggaca

SEQ ID NO: 184397 - DNA, 17 bp, synthetic construct
  source 1..17: mol_type = other DNA
gggcctccctgatggac

SEQ ID NO: 184398 - DNA, 17 bp, synthetic construct
  source 1..17: mol_type = other DNA
tgggcctccctgatgga

SEQ ID NO: 184399 - DNA, 17 bp, synthetic construct
  source 1..17: mol_type = other DNA
ttgggcctccctgatgg

SEQ ID NO: 184400 - DNA, 17 bp, synthetic construct
  source 1..17: mol_type = other DNA
gttgggcctccctgatg

SEQ ID NO: 184401 - DNA, 17 bp, synthetic construct
  source 1..17: mol_type = other DNA
ggttgggcctccctgat

SEQ ID NO: 184402 - DNA, 17 bp, synthetic construct
  source 1..17: mol_type = other DNA
gggttgggcctccctga

SEQ ID NO: 184403 - DNA, 17 bp, synthetic construct
  source 1..17: mol_type = other DNA
ggggttgggcctccctg

SEQ ID NO: 184404 - DNA, 17 bp, synthetic construct
  source 1..17: mol_type = other DNA
aggggttgggcctccct

SEQ ID NO: 184405 - DNA, 17 bp, synthetic construct
  source 1..17: mol_type = other DNA
caggggttgggcctccc

SEQ ID NO: 184406 - DNA, 17 bp, synthetic construct
  source 1..17: mol_type = other DNA
acaggggttgggcctcc

SEQ ID NO: 184407 - DNA, 17 bp, synthetic construct
  source 1..17: mol_type = other DNA
gacaggggttgggcctc

SEQ ID NO: 184408 - DNA, 17 bp, synthetic construct
  source 1..17: mol_type = other DNA
agacaggggttgggcct

SEQ ID NO: 184409 - DNA, 17 bp, synthetic construct
  source 1..17: mol_type = other DNA
cagacaggggttgggcc

SEQ ID NO: 184410 - DNA, 17 bp, synthetic construct
  source 1..17: mol_type = other DNA
ccagacaggggttgggc

SEQ ID NO: 184411 - DNA, 17 bp, synthetic construct
  source 1..17: mol_type = other DNA
cccagacaggggttggg

SEQ ID NO: 184412 - DNA, 17 bp, synthetic construct
  source 1..17: mol_type = other DNA
tcccagacaggggttgg

SEQ ID NO: 184413 - DNA, 17 bp, synthetic construct
  source 1..17: mol_type = other DNA
atcccagacaggggttg

SEQ ID NO: 184414 - DNA, 17 bp, synthetic construct
  source 1..17: mol_type = other DNA
catcccagacaggggtt

SEQ ID NO: 184415 - DNA, 17 bp, synthetic construct
  source 1..17: mol_type = other DNA
gcatcccagacaggggt

SEQ ID NO: 184416 - DNA, 17 bp, synthetic construct
  source 1..17: mol_type = other DNA
ggcatcccagacagggg

SEQ ID NO: 184417 - DNA, 17 bp, synthetic construct
  source 1..17: mol_type = other DNA
gggcatcccagacaggg

SEQ ID NO: 184418 - DNA, 17 bp, synthetic construct
  source 1..17: mol_type = other DNA
agggcatcccagacagg

SEQ ID NO: 184419 - DNA, 17 bp, synthetic construct
  source 1..17: mol_type = other DNA
cagggcatcccagacag

SEQ ID NO: 184420 - DNA, 17 bp, synthetic construct
  source 1..17: mol_type = other DNA
gcagggcatcccagaca

SEQ ID NO: 184421 - DNA, 17 bp, synthetic construct
  source 1..17: mol_type = other DNA
tgcagggcatcccagac

SEQ ID NO: 184422 - DNA, 17 bp, synthetic construct
  source 1..17: mol_type = other DNA
gtgcagggcatcccaga

SEQ ID NO: 184423 - DNA, 17 bp, synthetic construct
  source 1..17: mol_type = other DNA
tgtgcagggcatcccag

SEQ ID NO: 184424 - DNA, 17 bp, synthetic construct
  source 1..17: mol_type = other DNA
ctgtgcagggcatccca

SEQ ID NO: 184425 - DNA, 17 bp, synthetic construct
  source 1..17: mol_type = other DNA
gctgtgcagggcatccc

SEQ ID NO: 184426 - DNA, 17 bp, synthetic construct
  source 1..17: mol_type = other DNA
tgctgtgcagggcatcc

SEQ ID NO: 184427 - DNA, 17 bp, synthetic construct
  source 1..17: mol_type = other DNA
ctgctgtgcagggcatc

SEQ ID NO: 184428 - DNA, 17 bp, synthetic construct
  source 1..17: mol_type = other DNA
cctgctgtgcagggcat

SEQ ID NO: 184429 - DNA, 17 bp, synthetic construct
  source 1..17: mol_type = other DNA
ccctgctgtgcagggca

SEQ ID NO: 184430 - DNA, 17 bp, synthetic construct
  source 1..17: mol_type = other DNA
tccctgctgtgcagggc

SEQ ID NO: 184431 - DNA, 17 bp, synthetic construct
  source 1..17: mol_type = other DNA
ctccctgctgtgcaggg

SEQ ID NO: 184432 - DNA, 17 bp, synthetic construct
  source 1..17: mol_type = other DNA
cctccctgctgtgcagg

SEQ ID NO: 184433 - DNA, 17 bp, synthetic construct
  source 1..17: mol_type = other DNA
gcctccctgctgtgcag

SEQ ID NO: 184434 - DNA, 17 bp, synthetic construct
  source 1..17: mol_type = other DNA
ggcctccctgctgtgca

SEQ ID NO: 184435 - DNA, 17 bp, synthetic construct
  source 1..17: mol_type = other DNA
gggcctccctgctgtgc

SEQ ID NO: 184436 - DNA, 17 bp, synthetic construct
  source 1..17: mol_type = other DNA
ggggcctccctgctgtg

SEQ ID NO: 184437 - DNA, 17 bp, synthetic construct
  source 1..17: mol_type = other DNA
tggggcctccctgctgt

SEQ ID NO: 184438 - DNA, 17 bp, synthetic construct
  source 1..17: mol_type = other DNA
gtggggcctccctgctg

SEQ ID NO: 184439 - DNA, 17 bp, synthetic construct
  source 1..17: mol_type = other DNA
ggtggggcctccctgct

SEQ ID NO: 184440 - DNA, 17 bp, synthetic construct
  source 1..17: mol_type = other DNA
gggtggggcctccctgc

SEQ ID NO: 184441 - DNA, 17 bp, synthetic construct
  source 1..17: mol_type = other DNA
ggggtggggcctccctg

SEQ ID NO: 184442 - DNA, 17 bp, synthetic construct
  source 1..17: mol_type = other DNA
aggggtggggcctccct

SEQ ID NO: 184443 - DNA, 17 bp, synthetic construct
  source 1..17: mol_type = other DNA
caggggtggggcctccc

SEQ ID NO: 184444 - DNA, 17 bp, synthetic construct
  source 1..17: mol_type = other DNA
gcaggggtggggcctcc

SEQ ID NO: 184445 - DNA, 17 bp, synthetic construct
  source 1..17: mol_type = other DNA
agcaggggtggggcctc

SEQ ID NO: 184446 - DNA, 17 bp, synthetic construct
  source 1..17: mol_type = other DNA
cagcaggggtggggcct

SEQ ID NO: 184447 - DNA, 17 bp, synthetic construct
  source 1..17: mol_type = other DNA
ccagcaggggtggggcc

SEQ ID NO: 184448 - DNA, 17 bp, synthetic construct
  source 1..17: mol_type = other DNA
cccagcaggggtggggc

SEQ ID NO: 184449 - DNA, 17 bp, synthetic construct
  source 1..17: mol_type = other DNA
ccccagcaggggtgggg

SEQ ID NO: 184450 - DNA, 17 bp, synthetic construct
  source 1..17: mol_type = other DNA
tccccagcaggggtggg

SEQ ID NO: 184451 - DNA, 17 bp, synthetic construct
  source 1..17: mol_type = other DNA
ctccccagcaggggtgg

SEQ ID NO: 184452 - DNA, 17 bp, synthetic construct
  source 1..17: mol_type = other DNA
cctccccagcaggggtg

SEQ ID NO: 184453 - DNA, 17 bp, synthetic construct
  source 1..17: mol_type = other DNA
gcctccccagcaggggt

SEQ ID NO: 184454 - DNA, 17 bp, synthetic construct
  source 1..17: mol_type = other DNA
ggcctccccagcagggg

SEQ ID NO: 184455 - DNA, 17 bp, synthetic construct
  source 1..17: mol_type = other DNA
gggcctccccagcaggg

SEQ ID NO: 184456 - DNA, 17 bp, synthetic construct
  source 1..17: mol_type = other DNA
ggggcctccccagcagg

SEQ ID NO: 184457 - DNA, 17 bp, synthetic construct
  source 1..17: mol_type = other DNA
tggggcctccccagcag

SEQ ID NO: 184458 - DNA, 17 bp, synthetic construct
  source 1..17: mol_type = other DNA
gtggggcctccccagca

SEQ ID NO: 184459 - DNA, 17 bp, synthetic construct
  source 1..17: mol_type = other DNA
ggtggggcctccccagc

SEQ ID NO: 184460 - DNA, 17 bp, synthetic construct
  source 1..17: mol_type = other DNA
gggtggggcctccccag

SEQ ID NO: 184461 - DNA, 17 bp, synthetic construct
  source 1..17: mol_type = other DNA
ggggtggggcctcccca

SEQ ID NO: 184462 - DNA, 17 bp, synthetic construct
  source 1..17: mol_type = other DNA
aggggtggggcctcccc

SEQ ID NO: 184463 - DNA, 17 bp, synthetic construct
  source 1..17: mol_type = other DNA
caggggtggggcctccc

SEQ ID NO: 184464 - DNA, 17 bp, synthetic construct
  source 1..17: mol_type = other DNA
gcaggggtggggcctcc

SEQ ID NO: 184465 - DNA, 17 bp, synthetic construct
  source 1..17: mol_type = other DNA
ggcaggggtggggcctc

SEQ ID NO: 184466 - DNA, 17 bp, synthetic construct
  source 1..17: mol_type = other DNA
aggcaggggtggggcct

SEQ ID NO: 184467 - DNA, 17 bp, synthetic construct
  source 1..17: mol_type = other DNA
caggcaggggtggggcc

SEQ ID NO: 184468 - DNA, 17 bp, synthetic construct
  source 1..17: mol_type = other DNA
ccaggcaggggtggggc

SEQ ID NO: 184469 - DNA, 17 bp, synthetic construct
  source 1..17: mol_type = other DNA
cccaggcaggggtgggg

SEQ ID NO: 184470 - DNA, 17 bp, synthetic construct
  source 1..17: mol_type = other DNA
tcccaggcaggggtggg

SEQ ID NO: 184471 - DNA, 17 bp, synthetic construct
  source 1..17: mol_type = other DNA
ttcccaggcaggggtgg

SEQ ID NO: 184472 - DNA, 17 bp, synthetic construct
  source 1..17: mol_type = other DNA
cttcccaggcaggggtg

SEQ ID NO: 184473 - DNA, 17 bp, synthetic construct
  source 1..17: mol_type = other DNA
gcttcccaggcaggggt

SEQ ID NO: 184474 - DNA, 17 bp, synthetic construct
  source 1..17: mol_type = other DNA
ggcttcccaggcagggg

SEQ ID NO: 184475 - DNA, 17 bp, synthetic construct
  source 1..17: mol_type = other DNA
gggcttcccaggcaggg

SEQ ID NO: 184476 - DNA, 17 bp, synthetic construct
  source 1..17: mol_type = other DNA
ggggcttcccaggcagg

SEQ ID NO: 184477 - DNA, 17 bp, synthetic construct
  source 1..17: mol_type = other DNA
tggggcttcccaggcag

SEQ ID NO: 184478 - DNA, 17 bp, synthetic construct
  source 1..17: mol_type = other DNA
gtggggcttcccaggca

SEQ ID NO: 184479 - DNA, 17 bp, synthetic construct
  source 1..17: mol_type = other DNA
ggtggggcttcccaggc

SEQ ID NO: 184480 - DNA, 17 bp, synthetic construct
  source 1..17: mol_type = other DNA
gggtggggcttcccagg

SEQ ID NO: 184481 - DNA, 17 bp, synthetic construct
  source 1..17: mol_type = other DNA
ggggtggggcttcccag

SEQ ID NO: 184482 - DNA, 17 bp, synthetic construct
  source 1..17: mol_type = other DNA
aggggtggggcttccca

SEQ ID NO: 184483 - DNA, 17 bp, synthetic construct
  source 1..17: mol_type = other DNA
caggggtggggcttccc

SEQ ID NO: 184484 - DNA, 17 bp, synthetic construct
  source 1..17: mol_type = other DNA
gcaggggtggggcttcc

SEQ ID NO: 184485 - DNA, 17 bp, synthetic construct
  source 1..17: mol_type = other DNA
ggcaggggtggggcttc

SEQ ID NO: 184486 - DNA, 17 bp, synthetic construct
  source 1..17: mol_type = other DNA
aggcaggggtggggctt

SEQ ID NO: 184487 - DNA, 17 bp, synthetic construct
  source 1..17: mol_type = other DNA
caggcaggggtggggct

SEQ ID NO: 184488 - DNA, 17 bp, synthetic construct
  source 1..17: mol_type = other DNA
ccaggcaggggtggggc

SEQ ID NO: 184489 - DNA, 17 bp, synthetic construct
  source 1..17: mol_type = other DNA
cccaggcaggggtgggg

SEQ ID NO: 184490 - DNA, 17 bp, synthetic construct
  source 1..17: mol_type = other DNA
tcccaggcaggggtggg

SEQ ID NO: 184491 - DNA, 17 bp, synthetic construct
  source 1..17: mol_type = other DNA
ctcccaggcaggggtgg

SEQ ID NO: 184492 - DNA, 17 bp, synthetic construct
  source 1..17: mol_type = other DNA
cctcccaggcaggggtg

SEQ ID NO: 184493 - DNA, 17 bp, synthetic construct
  source 1..17: mol_type = other DNA
gcctcccaggcaggggt

SEQ ID NO: 184494 - DNA, 17 bp, synthetic construct
  source 1..17: mol_type = other DNA
ggcctcccaggcagggg

SEQ ID NO: 184495 - DNA, 17 bp, synthetic construct
  source 1..17: mol_type = other DNA
gggcctcccaggcaggg

SEQ ID NO: 184496 - DNA, 17 bp, synthetic construct
  source 1..17: mol_type = other DNA
ggggcctcccaggcagg

SEQ ID NO: 184497 - DNA, 17 bp, synthetic construct
  source 1..17: mol_type = other DNA
cggggcctcccaggcag

SEQ ID NO: 184498 - DNA, 17 bp, synthetic construct
  source 1..17: mol_type = other DNA
gcggggcctcccaggca

SEQ ID NO: 184499 - DNA, 17 bp, synthetic construct
  source 1..17: mol_type = other DNA
ggcggggcctcccaggc

SEQ ID NO: 184500 - DNA, 17 bp, synthetic construct
  source 1..17: mol_type = other DNA
gggcggggcctcccagg

SEQ ID NO: 184501 - DNA, 17 bp, synthetic construct
  source 1..17: mol_type = other DNA
ggggcggggcctcccag

SEQ ID NO: 184502 - DNA, 17 bp, synthetic construct
  source 1..17: mol_type = other DNA
aggggcggggcctccca

SEQ ID NO: 184503 - DNA, 17 bp, synthetic construct
  source 1..17: mol_type = other DNA
caggggcggggcctccc

SEQ ID NO: 184504 - DNA, 17 bp, synthetic construct
  source 1..17: mol_type = other DNA
gcaggggcggggcctcc

SEQ ID NO: 184505 - DNA, 17 bp, synthetic construct
  source 1..17: mol_type = other DNA
ggcaggggcggggcctc

SEQ ID NO: 184506 - DNA, 17 bp, synthetic construct
  source 1..17: mol_type = other DNA
gggcaggggcggggcct

SEQ ID NO: 184507 - DNA, 17 bp, synthetic construct
  source 1..17: mol_type = other DNA
cgggcaggggcggggcc

SEQ ID NO: 184508 - DNA, 17 bp, synthetic construct
  source 1..17: mol_type = other DNA
ccgggcaggggcggggc

SEQ ID NO: 184509 - DNA, 17 bp, synthetic construct
  source 1..17: mol_type = other DNA
cccgggcaggggcgggg

SEQ ID NO: 184510 - DNA, 17 bp, synthetic construct
  source 1..17: mol_type = other DNA
tcccgggcaggggcggg

SEQ ID NO: 184511 - DNA, 17 bp, synthetic construct
  source 1..17: mol_type = other DNA
ctcccgggcaggggcgg

SEQ ID NO: 184512 - DNA, 17 bp, synthetic construct
  source 1..17: mol_type = other DNA
cctcccgggcaggggcg

SEQ ID NO: 184513 - DNA, 17 bp, synthetic construct
  source 1..17: mol_type = other DNA
gcctcccgggcaggggc

SEQ ID NO: 184514 - DNA, 17 bp, synthetic construct
  source 1..17: mol_type = other DNA
ggcctcccgggcagggg

SEQ ID NO: 184515 - DNA, 17 bp, synthetic construct
  source 1..17: mol_type = other DNA
tggcctcccgggcaggg

SEQ ID NO: 184516 - DNA, 17 bp, synthetic construct
  source 1..17: mol_type = other DNA
atggcctcccgggcagg

SEQ ID NO: 184517 - DNA, 17 bp, synthetic construct
  source 1..17: mol_type = other DNA
catggcctcccgggcag

SEQ ID NO: 184518 - DNA, 17 bp, synthetic construct
  source 1..17: mol_type = other DNA
gcatggcctcccgggca

SEQ ID NO: 184519 - DNA, 17 bp, synthetic construct
  source 1..17: mol_type = other DNA
ggcatggcctcccgggc

SEQ ID NO: 184520 - DNA, 17 bp, synthetic construct
  source 1..17: mol_type = other DNA
gggcatggcctcccggg

SEQ ID NO: 184521 - DNA, 17 bp, synthetic construct
  source 1..17: mol_type = other DNA
ggggcatggcctcccgg

SEQ ID NO: 184522 - DNA, 17 bp, synthetic construct
  source 1..17: mol_type = other DNA
aggggcatggcctcccg

SEQ ID NO: 184523 - DNA, 17 bp, synthetic construct
  source 1..17: mol_type = other DNA
caggggcatggcctccc

SEQ ID NO: 184524 - DNA, 17 bp, synthetic construct
  source 1..17: mol_type = other DNA
gcaggggcatggcctcc

SEQ ID NO: 184525 - DNA, 17 bp, synthetic construct
  source 1..17: mol_type = other DNA
ggcaggggcatggcctc

SEQ ID NO: 184526 - DNA, 17 bp, synthetic construct
  source 1..17: mol_type = other DNA
gggcaggggcatggcct

SEQ ID NO: 184527 - DNA, 17 bp, synthetic construct
  source 1..17: mol_type = other DNA
cgggcaggggcatggcc

SEQ ID NO: 184528 - DNA, 17 bp, synthetic construct
  source 1..17: mol_type = other DNA
ccgggcaggggcatggc

SEQ ID NO: 184529 - DNA, 17 bp, synthetic construct
  source 1..17: mol_type = other DNA
cccgggcaggggcatgg

SEQ ID NO: 184530 - DNA, 17 bp, synthetic construct
  source 1..17: mol_type = other DNA
acccgggcaggggcatg

SEQ ID NO: 184531 - DNA, 17 bp, synthetic construct
  source 1..17: mol_type = other DNA
cacccgggcaggggcat

SEQ ID NO: 184532 - DNA, 17 bp, synthetic construct
  source 1..17: mol_type = other DNA
ccacccgggcaggggca

SEQ ID NO: 184533 - DNA, 17 bp, synthetic construct
  source 1..17: mol_type = other DNA
cccacccgggcaggggc

SEQ ID NO: 184534 - DNA, 17 bp, synthetic construct
  source 1..17: mol_type = other DNA
gcccacccgggcagggg

SEQ ID NO: 184535 - DNA, 17 bp, synthetic construct
  source 1..17: mol_type = other DNA
ggcccacccgggcaggg

SEQ ID NO: 184536 - DNA, 17 bp, synthetic construct
  source 1..17: mol_type = other DNA
gggcccacccgggcagg

SEQ ID NO: 184537 - DNA, 17 bp, synthetic construct
  source 1..17: mol_type = other DNA
ggggcccacccgggcag

SEQ ID NO: 184538 - DNA, 17 bp, synthetic construct
  source 1..17: mol_type = other DNA
aggggcccacccgggca

SEQ ID NO: 184539 - DNA, 17 bp, synthetic construct
  source 1..17: mol_type = other DNA
gaggggcccacccgggc

SEQ ID NO: 184540 - DNA, 17 bp, synthetic construct
  source 1..17: mol_type = other DNA
ggaggggcccacccggg

SEQ ID NO: 184541 - DNA, 17 bp, synthetic construct
  source 1..17: mol_type = other DNA
gggaggggcccacccgg

SEQ ID NO: 184542 - DNA, 17 bp, synthetic construct
  source 1..17: mol_type = other DNA
ggggaggggcccacccg

SEQ ID NO: 184543 - DNA, 17 bp, synthetic construct
  source 1..17: mol_type = other DNA
tggggaggggcccaccc

SEQ ID NO: 184544 - DNA, 17 bp, synthetic construct
  source 1..17: mol_type = other DNA
ctggggaggggcccacc

SEQ ID NO: 184545 - DNA, 17 bp, synthetic construct
  source 1..17: mol_type = other DNA
cctggggaggggcccac

SEQ ID NO: 184546 - DNA, 17 bp, synthetic construct
  source 1..17: mol_type = other DNA
tcctggggaggggccca

SEQ ID NO: 184547 - DNA, 17 bp, synthetic construct
  source 1..17: mol_type = other DNA
ctcctggggaggggccc

SEQ ID NO: 184548 - DNA, 17 bp, synthetic construct
  source 1..17: mol_type = other DNA
cctcctggggaggggcc

SEQ ID NO: 184549 - DNA, 17 bp, synthetic construct
  source 1..17: mol_type = other DNA
gcctcctggggaggggc

SEQ ID NO: 184550 - DNA, 17 bp, synthetic construct
  source 1..17: mol_type = other DNA
ggcctcctggggagggg

SEQ ID NO: 184551 - DNA, 17 bp, synthetic construct
  source 1..17: mol_type = other DNA
cggcctcctggggaggg

SEQ ID NO: 184552 - DNA, 17 bp, synthetic construct
  source 1..17: mol_type = other DNA
gcggcctcctggggagg

SEQ ID NO: 184553 - DNA, 17 bp, synthetic construct
  source 1..17: mol_type = other DNA
tgcggcctcctggggag

SEQ ID NO: 184554 - DNA, 17 bp, synthetic construct
  source 1..17: mol_type = other DNA
gtgcggcctcctgggga

SEQ ID NO: 184555 - DNA, 17 bp, synthetic construct
  source 1..17: mol_type = other DNA
ggtgcggcctcctgggg

SEQ ID NO: 184556 - DNA, 17 bp, synthetic construct
  source 1..17: mol_type = other DNA
gggtgcggcctcctggg

SEQ ID NO: 184557 - DNA, 17 bp, synthetic construct
  source 1..17: mol_type = other DNA
tgggtgcggcctcctgg

SEQ ID NO: 184558 - DNA, 17 bp, synthetic construct
  source 1..17: mol_type = other DNA
gtgggtgcggcctcctg

SEQ ID NO: 184559 - DNA, 17 bp, synthetic construct
  source 1..17: mol_type = other DNA
ggtgggtgcggcctcct

SEQ ID NO: 184560 - DNA, 17 bp, synthetic construct
  source 1..17: mol_type = other DNA
tggtgggtgcggcctcc

SEQ ID NO: 184561 - DNA, 17 bp, synthetic construct
  source 1..17: mol_type = other DNA
ctggtgggtgcggcctc

SEQ ID NO: 184562 - DNA, 17 bp, synthetic construct
  source 1..17: mol_type = other DNA
cctggtgggtgcggcct

SEQ ID NO: 184563 - DNA, 17 bp, synthetic construct
  source 1..17: mol_type = other DNA
ccctggtgggtgcggcc

SEQ ID NO: 184564 - DNA, 17 bp, synthetic construct
  source 1..17: mol_type = other DNA
tccctggtgggtgcggc

SEQ ID NO: 184565 - DNA, 17 bp, synthetic construct
  source 1..17: mol_type = other DNA
ctccctggtgggtgcgg

SEQ ID NO: 184566 - DNA, 17 bp, synthetic construct
  source 1..17: mol_type = other DNA
cctccctggtgggtgcg

SEQ ID NO: 184567 - DNA, 17 bp, synthetic construct
  source 1..17: mol_type = other DNA
gcctccctggtgggtgc

SEQ ID NO: 184568 - DNA, 17 bp, synthetic construct
  source 1..17: mol_type = other DNA
ggcctccctggtgggtg

SEQ ID NO: 184569 - DNA, 17 bp, synthetic construct
  source 1..17: mol_type = other DNA
gggcctccctggtgggt

SEQ ID NO: 184570 - DNA, 17 bp, synthetic construct
  source 1..17: mol_type = other DNA
ggggcctccctggtggg

SEQ ID NO: 184571 - DNA, 17 bp, synthetic construct
  source 1..17: mol_type = other DNA
cggggcctccctggtgg

SEQ ID NO: 184572 - DNA, 17 bp, synthetic construct
  source 1..17: mol_type = other DNA
gcggggcctccctggtg

SEQ ID NO: 184573 - DNA, 17 bp, synthetic construct
  source 1..17: mol_type = other DNA
ggcggggcctccctggt

SEQ ID NO: 184574 - DNA, 17 bp, synthetic construct
  source 1..17: mol_type = other DNA
gggcggggcctccctgg

SEQ ID NO: 184575 - DNA, 17 bp, synthetic construct
  source 1..17: mol_type = other DNA
tgggcggggcctccctg

SEQ ID NO: 184576 - DNA, 17 bp, synthetic construct
  source 1..17: mol_type = other DNA
gtgggcggggcctccct

SEQ ID NO: 184577 - DNA, 17 bp, synthetic construct
  source 1..17: mol_type = other DNA
tgtgggcggggcctccc

SEQ ID NO: 184578 - DNA, 17 bp, synthetic construct
  source 1..17: mol_type = other DNA
ctgtgggcggggcctcc

SEQ ID NO: 184579 - DNA, 17 bp, synthetic construct
  source 1..17: mol_type = other DNA
gctgtgggcggggcctc

SEQ ID NO: 184580 - DNA, 17 bp, synthetic construct
  source 1..17: mol_type = other DNA
ggctgtgggcggggcct

SEQ ID NO: 184581 - DNA, 17 bp, synthetic construct
  source 1..17: mol_type = other DNA
gggctgtgggcggggcc

SEQ ID NO: 184582 - DNA, 17 bp, synthetic construct
  source 1..17: mol_type = other DNA
agggctgtgggcggggc

SEQ ID NO: 184583 - DNA, 17 bp, synthetic construct
  source 1..17: mol_type = other DNA
cagggctgtgggcgggg

SEQ ID NO: 184584 - DNA, 17 bp, synthetic construct
  source 1..17: mol_type = other DNA
gcagggctgtgggcggg

SEQ ID NO: 184585 - DNA, 17 bp, synthetic construct
  source 1..17: mol_type = other DNA
ggcagggctgtgggcgg

SEQ ID NO: 184586 - DNA, 17 bp, synthetic construct
  source 1..17: mol_type = other DNA
gggcagggctgtgggcg

SEQ ID NO: 184587 - DNA, 17 bp, synthetic construct
  source 1..17: mol_type = other DNA
ggggcagggctgtgggc

SEQ ID NO: 184588 - DNA, 17 bp, synthetic construct
  source 1..17: mol_type = other DNA
gggggcagggctgtggg

SEQ ID NO: 184589 - DNA, 17 bp, synthetic construct
  source 1..17: mol_type = other DNA
agggggcagggctgtgg

SEQ ID NO: 184590 - DNA, 17 bp, synthetic construct
  source 1..17: mol_type = other DNA
cagggggcagggctgtg

SEQ ID NO: 184591 - DNA, 17 bp, synthetic construct
  source 1..17: mol_type = other DNA
acagggggcagggctgt

SEQ ID NO: 184592 - DNA, 17 bp, synthetic construct
  source 1..17: mol_type = other DNA
gacagggggcagggctg

SEQ ID NO: 184593 - DNA, 17 bp, synthetic construct
  source 1..17: mol_type = other DNA
agacagggggcagggct

SEQ ID NO: 184594 - DNA, 17 bp, synthetic construct
  source 1..17: mol_type = other DNA
aagacagggggcagggc

SEQ ID NO: 184595 - DNA, 17 bp, synthetic construct
  source 1..17: mol_type = other DNA
aaagacagggggcaggg

SEQ ID NO: 184596 - DNA, 17 bp, synthetic construct
  source 1..17: mol_type = other DNA
caaagacagggggcagg

SEQ ID NO: 184597 - DNA, 17 bp, synthetic construct
  source 1..17: mol_type = other DNA
ccaaagacagggggcag

SEQ ID NO: 184598 - DNA, 17 bp, synthetic construct
  source 1..17: mol_type = other DNA
gccaaagacagggggca

SEQ ID NO: 184599 - DNA, 17 bp, synthetic construct
  source 1..17: mol_type = other DNA
ggccaaagacagggggc

SEQ ID NO: 184600 - DNA, 17 bp, synthetic construct
  source 1..17: mol_type = other DNA
gggccaaagacaggggg

SEQ ID NO: 184601 - DNA, 17 bp, synthetic construct
  source 1..17: mol_type = other DNA
ggggccaaagacagggg

SEQ ID NO: 184602 - DNA, 17 bp, synthetic construct
  source 1..17: mol_type = other DNA
gggggccaaagacaggg

SEQ ID NO: 184603 - DNA, 17 bp, synthetic construct
  source 1..17: mol_type = other DNA
tgggggccaaagacagg

SEQ ID NO: 184604 - DNA, 17 bp, synthetic construct
  source 1..17: mol_type = other DNA
gtgggggccaaagacag

SEQ ID NO: 184605 - DNA, 17 bp, synthetic construct
  source 1..17: mol_type = other DNA
ggtgggggccaaagaca

SEQ ID NO: 184606 - DNA, 17 bp, synthetic construct
  source 1..17: mol_type = other DNA
tggtgggggccaaagac

SEQ ID NO: 184607 - DNA, 17 bp, synthetic construct
  source 1..17: mol_type = other DNA
ctggtgggggccaaaga

SEQ ID NO: 184608 - DNA, 17 bp, synthetic construct
  source 1..17: mol_type = other DNA
cctggtgggggccaaag

SEQ ID NO: 184609 - DNA, 17 bp, synthetic construct
  source 1..17: mol_type = other DNA
ccctggtgggggccaaa

SEQ ID NO: 184610 - DNA, 17 bp, synthetic construct
  source 1..17: mol_type = other DNA
cccctggtgggggccaa

SEQ ID NO: 184611 - DNA, 17 bp, synthetic construct
  source 1..17: mol_type = other DNA
tcccctggtgggggcca

SEQ ID NO: 184612 - DNA, 17 bp, synthetic construct
  source 1..17: mol_type = other DNA
ctcccctggtgggggcc

SEQ ID NO: 184613 - DNA, 17 bp, synthetic construct
  source 1..17: mol_type = other DNA
gctcccctggtgggggc

SEQ ID NO: 184614 - DNA, 17 bp, synthetic construct
  source 1..17: mol_type = other DNA
ggctcccctggtggggg

SEQ ID NO: 184615 - DNA, 17 bp, synthetic construct
  source 1..17: mol_type = other DNA
aggctcccctggtgggg

SEQ ID NO: 184616 - DNA, 17 bp, synthetic construct
  source 1..17: mol_type = other DNA
gaggctcccctggtggg

SEQ ID NO: 184617 - DNA, 17 bp, synthetic construct
  source 1..17: mol_type = other DNA
tgaggctcccctggtgg

SEQ ID NO: 184618 - DNA, 17 bp, synthetic construct
  source 1..17: mol_type = other DNA
ctgaggctcccctggtg

SEQ ID NO: 184619 - DNA, 17 bp, synthetic construct
  source 1..17: mol_type = other DNA
cctgaggctcccctggt

SEQ ID NO: 184620 - DNA, 17 bp, synthetic construct
  source 1..17: mol_type = other DNA
tcctgaggctcccctgg

SEQ ID NO: 184621 - DNA, 17 bp, synthetic construct
  source 1..17: mol_type = other DNA
ttcctgaggctcccctg

SEQ ID NO: 184622 - DNA, 17 bp, synthetic construct
  source 1..17: mol_type = other DNA
tttcctgaggctcccct

SEQ ID NO: 184623 - DNA, 17 bp, synthetic construct
  source 1..17: mol_type = other DNA
ttttcctgaggctcccc

SEQ ID NO: 184624 - DNA, 17 bp, synthetic construct
  source 1..17: mol_type = other DNA
gttttcctgaggctccc

SEQ ID NO: 184625 - DNA, 17 bp, synthetic construct
  source 1..17: mol_type = other DNA
ggttttcctgaggctcc

SEQ ID NO: 184626 - DNA, 17 bp, synthetic construct
  source 1..17: mol_type = other DNA
cggttttcctgaggctc

SEQ ID NO: 184627 - DNA, 17 bp, synthetic construct
  source 1..17: mol_type = other DNA
ccggttttcctgaggct

SEQ ID NO: 184628 - DNA, 17 bp, synthetic construct
  source 1..17: mol_type = other DNA
gccggttttcctgaggc

SEQ ID NO: 184629 - DNA, 17 bp, synthetic construct
  source 1..17: mol_type = other DNA
agccggttttcctgagg

SEQ ID NO: 184630 - DNA, 17 bp, synthetic construct
  source 1..17: mol_type = other DNA
cagccggttttcctgag

SEQ ID NO: 184631 - DNA, 17 bp, synthetic construct
  source 1..17: mol_type = other DNA
gcagccggttttcctga

SEQ ID NO: 184632 - DNA, 17 bp, synthetic construct
  source 1..17: mol_type = other DNA
agcagccggttttcctg

SEQ ID NO: 184633 - DNA, 17 bp, synthetic construct
  source 1..17: mol_type = other DNA
cagcagccggttttcct

SEQ ID NO: 184634 - DNA, 17 bp, synthetic construct
  source 1..17: mol_type = other DNA
gcagcagccggttttcc

SEQ ID NO: 184635 - DNA, 17 bp, synthetic construct
  source 1..17: mol_type = other DNA
agcagcagccggttttc

SEQ ID NO: 184636 - DNA, 17 bp, synthetic construct
  source 1..17: mol_type = other DNA
tagcagcagccggtttt

SEQ ID NO: 184637 - DNA, 17 bp, synthetic construct
  source 1..17: mol_type = other DNA
gtagcagcagccggttt

SEQ ID NO: 184638 - DNA, 17 bp, synthetic construct
  source 1..17: mol_type = other DNA
agtagcagcagccggtt

SEQ ID NO: 184639 - DNA, 17 bp, synthetic construct
  source 1..17: mol_type = other DNA
gagtagcagcagccggt

SEQ ID NO: 184640 - DNA, 17 bp, synthetic construct
  source 1..17: mol_type = other DNA
ggagtagcagcagccgg

SEQ ID NO: 184641 - DNA, 17 bp, synthetic construct
  source 1..17: mol_type = other DNA
aggagtagcagcagccg

SEQ ID NO: 184642 - DNA, 17 bp, synthetic construct
  source 1..17: mol_type = other DNA
caggagtagcagcagcc

SEQ ID NO: 184643 - DNA, 17 bp, synthetic construct
  source 1..17: mol_type = other DNA
acaggagtagcagcagc

SEQ ID NO: 184644 - DNA, 17 bp, synthetic construct
  source 1..17: mol_type = other DNA
cacaggagtagcagcag

SEQ ID NO: 184645 - DNA, 17 bp, synthetic construct
  source 1..17: mol_type = other DNA
tcacaggagtagcagca

SEQ ID NO: 184646 - DNA, 17 bp, synthetic construct
  source 1..17: mol_type = other DNA
ctcacaggagtagcagc

SEQ ID NO: 184647 - DNA, 17 bp, synthetic construct
  source 1..17: mol_type = other DNA
cctcacaggagtagcag

SEQ ID NO: 184648 - DNA, 17 bp, synthetic construct
  source 1..17: mol_type = other DNA
tcctcacaggagtagca

SEQ ID NO: 184649 - DNA, 17 bp, synthetic construct
  source 1..17: mol_type = other DNA
ctcctcacaggagtagc

SEQ ID NO: 184650 - DNA, 17 bp, synthetic construct
  source 1..17: mol_type = other DNA
cctcctcacaggagtag

SEQ ID NO: 184651 - DNA, 17 bp, synthetic construct
  source 1..17: mol_type = other DNA
ccctcctcacaggagta

SEQ ID NO: 184652 - DNA, 17 bp, synthetic construct
  source 1..17: mol_type = other DNA
accctcctcacaggagt

SEQ ID NO: 184653 - DNA, 17 bp, synthetic construct
  source 1..17: mol_type = other DNA
taccctcctcacaggag

SEQ ID NO: 184654 - DNA, 17 bp, synthetic construct
  source 1..17: mol_type = other DNA
ttaccctcctcacagga

SEQ ID NO: 184655 - DNA, 17 bp, synthetic construct
  source 1..17: mol_type = other DNA
cttaccctcctcacagg

SEQ ID NO: 184656 - DNA, 17 bp, synthetic construct
  source 1..17: mol_type = other DNA
acttaccctcctcacag

SEQ ID NO: 184657 - DNA, 17 bp, synthetic construct
  source 1..17: mol_type = other DNA
cacttaccctcctcaca

SEQ ID NO: 184658 - DNA, 17 bp, synthetic construct
  source 1..17: mol_type = other DNA
ccacttaccctcctcac

SEQ ID NO: 184659 - DNA, 17 bp, synthetic construct
  source 1..17: mol_type = other DNA
tccacttaccctcctca

SEQ ID NO: 184660 - DNA, 17 bp, synthetic construct
  source 1..17: mol_type = other DNA
ttccacttaccctcctc

SEQ ID NO: 184661 - DNA, 17 bp, synthetic construct
  source 1..17: mol_type = other DNA
cttccacttaccctcct

SEQ ID NO: 184662 - DNA, 17 bp, synthetic construct
  source 1..17: mol_type = other DNA
gcttccacttaccctcc

SEQ ID NO: 184663 - DNA, 17 bp, synthetic construct
  source 1..17: mol_type = other DNA
ggcttccacttaccctc

SEQ ID NO: 184664 - DNA, 17 bp, synthetic construct
  source 1..17: mol_type = other DNA
tggcttccacttaccct

SEQ ID NO: 184665 - DNA, 17 bp, synthetic construct
  source 1..17: mol_type = other DNA
gtggcttccacttaccc

SEQ ID NO: 184666 - DNA, 17 bp, synthetic construct
  source 1..17: mol_type = other DNA
ggtggcttccacttacc

SEQ ID NO: 184667 - DNA, 17 bp, synthetic construct
  source 1..17: mol_type = other DNA
aggtggcttccacttac

SEQ ID NO: 184668 - DNA, 17 bp, synthetic construct
  source 1..17: mol_type = other DNA
aaggtggcttccactta

SEQ ID NO: 184669 - DNA, 17 bp, synthetic construct
  source 1..17: mol_type = other DNA
gaaggtggcttccactt

SEQ ID NO: 184670 - DNA, 17 bp, synthetic construct
  source 1..17: mol_type = other DNA
ggaaggtggcttccact

SEQ ID NO: 184671 - DNA, 17 bp, synthetic construct
  source 1..17: mol_type = other DNA
gggaaggtggcttccac

SEQ ID NO: 184672 - DNA, 17 bp, synthetic construct
  source 1..17: mol_type = other DNA
tgggaaggtggcttcca

SEQ ID NO: 184673 - DNA, 17 bp, synthetic construct
  source 1..17: mol_type = other DNA
gtgggaaggtggcttcc

SEQ ID NO: 184674 - DNA, 17 bp, synthetic construct
  source 1..17: mol_type = other DNA
tgtgggaaggtggcttc

SEQ ID NO: 184675 - DNA, 17 bp, synthetic construct
  source 1..17: mol_type = other DNA
gtgtgggaaggtggctt

SEQ ID NO: 184676 - DNA, 17 bp, synthetic construct
  source 1..17: mol_type = other DNA
ggtgtgggaaggtggct

SEQ ID NO: 184677 - DNA, 17 bp, synthetic construct
  source 1..17: mol_type = other DNA
tggtgtgggaaggtggc

SEQ ID NO: 184678 - DNA, 17 bp, synthetic construct
  source 1..17: mol_type = other DNA
ctggtgtgggaaggtgg

SEQ ID NO: 184679 - DNA, 17 bp, synthetic construct
  source 1..17: mol_type = other DNA
gctggtgtgggaaggtg

SEQ ID NO: 184680 - DNA, 17 bp, synthetic construct
  source 1..17: mol_type = other DNA
ggctggtgtgggaaggt

SEQ ID NO: 184681 - DNA, 17 bp, synthetic construct
  source 1..17: mol_type = other DNA
gggctggtgtgggaagg

SEQ ID NO: 184682 - DNA, 17 bp, synthetic construct
  source 1..17: mol_type = other DNA
agggctggtgtgggaag

SEQ ID NO: 184683 - DNA, 17 bp, synthetic construct
  source 1..17: mol_type = other DNA
gagggctggtgtgggaa

SEQ ID NO: 184684 - DNA, 17 bp, synthetic construct
  source 1..17: mol_type = other DNA
ggagggctggtgtggga

SEQ ID NO: 184685 - DNA, 17 bp, synthetic construct
  source 1..17: mol_type = other DNA
tggagggctggtgtggg

SEQ ID NO: 184686 - DNA, 17 bp, synthetic construct
  source 1..17: mol_type = other DNA
ctggagggctggtgtgg

SEQ ID NO: 184687 - DNA, 17 bp, synthetic construct
  source 1..17: mol_type = other DNA
gctggagggctggtgtg

SEQ ID NO: 184688 - DNA, 17 bp, synthetic construct
  source 1..17: mol_type = other DNA
agctggagggctggtgt

SEQ ID NO: 184689 - DNA, 17 bp, synthetic construct
  source 1..17: mol_type = other DNA
gagctggagggctggtg

SEQ ID NO: 184690 - DNA, 17 bp, synthetic construct
  source 1..17: mol_type = other DNA
ggagctggagggctggt

SEQ ID NO: 184691 - DNA, 17 bp, synthetic construct
  source 1..17: mol_type = other DNA
tggagctggagggctgg

SEQ ID NO: 184692 - DNA, 17 bp, synthetic construct
  source 1..17: mol_type = other DNA
ctggagctggagggctg

SEQ ID NO: 184693 - DNA, 17 bp, synthetic construct
  source 1..17: mol_type = other DNA
gctggagctggagggct

SEQ ID NO: 184694 - DNA, 17 bp, synthetic construct
  source 1..17: mol_type = other DNA
ggctggagctggagggc

SEQ ID NO: 184695 - DNA, 17 bp, synthetic construct
  source 1..17: mol_type = other DNA
gggctggagctggaggg

SEQ ID NO: 184696 - DNA, 17 bp, synthetic construct
  source 1..17: mol_type = other DNA
cgggctggagctggagg

SEQ ID NO: 184697 - DNA, 17 bp, synthetic construct
  source 1..17: mol_type = other DNA
acgggctggagctggag

SEQ ID NO: 184698 - DNA, 17 bp, synthetic construct
  source 1..17: mol_type = other DNA
gacgggctggagctgga

SEQ ID NO: 184699 - DNA, 17 bp, synthetic construct
  source 1..17: mol_type = other DNA
cgacgggctggagctgg

SEQ ID NO: 184700 - DNA, 17 bp, synthetic construct
  source 1..17: mol_type = other DNA
gcgacgggctggagctg

SEQ ID NO: 184701 - DNA, 17 bp, synthetic construct
  source 1..17: mol_type = other DNA
ggcgacgggctggagct

SEQ ID NO: 184702 - DNA, 17 bp, synthetic construct
  source 1..17: mol_type = other DNA
tggcgacgggctggagc

SEQ ID NO: 184703 - DNA, 17 bp, synthetic construct
  source 1..17: mol_type = other DNA
gtggcgacgggctggag

SEQ ID NO: 184704 - DNA, 17 bp, synthetic construct
  source 1..17: mol_type = other DNA
ggtggcgacgggctgga

SEQ ID NO: 184705 - DNA, 17 bp, synthetic construct
  source 1..17: mol_type = other DNA
gggtggcgacgggctgg

SEQ ID NO: 184706 - DNA, 17 bp, synthetic construct
  source 1..17: mol_type = other DNA
tgggtggcgacgggctg

SEQ ID NO: 184707 - DNA, 17 bp, synthetic construct
  source 1..17: mol_type = other DNA
atgggtggcgacgggct

SEQ ID NO: 184708 - DNA, 17 bp, synthetic construct
  source 1..17: mol_type = other DNA
gatgggtggcgacgggc

SEQ ID NO: 184709 - DNA, 17 bp, synthetic construct
  source 1..17: mol_type = other DNA
ggatgggtggcgacggg

SEQ ID NO: 184710 - DNA, 17 bp, synthetic construct
  source 1..17: mol_type = other DNA
tggatgggtggcgacgg

SEQ ID NO: 184711 - DNA, 17 bp, synthetic construct
  source 1..17: mol_type = other DNA
atggatgggtggcgacg

SEQ ID NO: 184712 - DNA, 17 bp, synthetic construct
  source 1..17: mol_type = other DNA
aatggatgggtggcgac

SEQ ID NO: 184713 - DNA, 17 bp, synthetic construct
  source 1..17: mol_type = other DNA
gaatggatgggtggcga

SEQ ID NO: 184714 - DNA, 17 bp, synthetic construct
  source 1..17: mol_type = other DNA
ggaatggatgggtggcg

SEQ ID NO: 184715 - DNA, 17 bp, synthetic construct
  source 1..17: mol_type = other DNA
aggaatggatgggtggc

SEQ ID NO: 184716 - DNA, 17 bp, synthetic construct
  source 1..17: mol_type = other DNA
caggaatggatgggtgg

SEQ ID NO: 184717 - DNA, 17 bp, synthetic construct
  source 1..17: mol_type = other DNA
gcaggaatggatgggtg

SEQ ID NO: 184718 - DNA, 17 bp, synthetic construct
  source 1..17: mol_type = other DNA
ggcaggaatggatgggt

SEQ ID NO: 184719 - DNA, 17 bp, synthetic construct
  source 1..17: mol_type = other DNA
gggcaggaatggatggg

SEQ ID NO: 184720 - DNA, 17 bp, synthetic construct
  source 1..17: mol_type = other DNA
tgggcaggaatggatgg

SEQ ID NO: 184721 - DNA, 17 bp, synthetic construct
  source 1..17: mol_type = other DNA
ctgggcaggaatggatg

SEQ ID NO: 184722 - DNA, 17 bp, synthetic construct
  source 1..17: mol_type = other DNA
tctgggcaggaatggat

SEQ ID NO: 184723 - DNA, 17 bp, synthetic construct
  source 1..17: mol_type = other DNA
gtctgggcaggaatgga

SEQ ID NO: 184724 - DNA, 17 bp, synthetic construct
  source 1..17: mol_type = other DNA
tgtctgggcaggaatgg

SEQ ID NO: 184725 - DNA, 17 bp, synthetic construct
  source 1..17: mol_type = other DNA
atgtctgggcaggaatg

SEQ ID NO: 184726 - DNA, 17 bp, synthetic construct
  source 1..17: mol_type = other DNA
gatgtctgggcaggaat

SEQ ID NO: 184727 - DNA, 17 bp, synthetic construct
  source 1..17: mol_type = other DNA
agatgtctgggcaggaa

SEQ ID NO: 184728 - DNA, 17 bp, synthetic construct
  source 1..17: mol_type = other DNA
cagatgtctgggcagga

SEQ ID NO: 184729 - DNA, 17 bp, synthetic construct
  source 1..17: mol_type = other DNA
gcagatgtctgggcagg

SEQ ID NO: 184730 - DNA, 17 bp, synthetic construct
  source 1..17: mol_type = other DNA
tgcagatgtctgggcag

SEQ ID NO: 184731 - DNA, 17 bp, synthetic construct
  source 1..17: mol_type = other DNA
gtgcagatgtctgggca

SEQ ID NO: 184732 - DNA, 17 bp, synthetic construct
  source 1..17: mol_type = other DNA
agtgcagatgtctgggc

SEQ ID NO: 184733 - DNA, 17 bp, synthetic construct
  source 1..17: mol_type = other DNA
tagtgcagatgtctggg

SEQ ID NO: 184734 - DNA, 17 bp, synthetic construct
  source 1..17: mol_type = other DNA
ctagtgcagatgtctgg

SEQ ID NO: 184735 - DNA, 17 bp, synthetic construct
  source 1..17: mol_type = other DNA
cctagtgcagatgtctg

SEQ ID NO: 184736 - DNA, 17 bp, synthetic construct
  source 1..17: mol_type = other DNA
gcctagtgcagatgtct

SEQ ID NO: 184737 - DNA, 17 bp, synthetic construct
  source 1..17: mol_type = other DNA
tgcctagtgcagatgtc

SEQ ID NO: 184738 - DNA, 17 bp, synthetic construct
  source 1..17: mol_type = other DNA
ctgcctagtgcagatgt

SEQ ID NO: 184739 - DNA, 17 bp, synthetic construct
  source 1..17: mol_type = other DNA
gctgcctagtgcagatg

SEQ ID NO: 184740 - DNA, 17 bp, synthetic construct
  source 1..17: mol_type = other DNA
tgctgcctagtgcagat

SEQ ID NO: 184741 - DNA, 17 bp, synthetic construct
  source 1..17: mol_type = other DNA
ctgctgcctagtgcaga

SEQ ID NO: 184742 - DNA, 17 bp, synthetic construct
  source 1..17: mol_type = other DNA
actgctgcctagtgcag

SEQ ID NO: 184743 - DNA, 17 bp, synthetic construct
  source 1..17: mol_type = other DNA
cactgctgcctagtgca

SEQ ID NO: 184744 - DNA, 17 bp, synthetic construct
  source 1..17: mol_type = other DNA
ccactgctgcctagtgc

SEQ ID NO: 184745 - DNA, 17 bp, synthetic construct
  source 1..17: mol_type = other DNA
cccactgctgcctagtg

SEQ ID NO: 184746 - DNA, 17 bp, synthetic construct
  source 1..17: mol_type = other DNA
tcccactgctgcctagt

SEQ ID NO: 184747 - DNA, 17 bp, synthetic construct
  source 1..17: mol_type = other DNA
atcccactgctgcctag

SEQ ID NO: 184748 - DNA, 17 bp, synthetic construct
  source 1..17: mol_type = other DNA
catcccactgctgccta

SEQ ID NO: 184749 - DNA, 17 bp, synthetic construct
  source 1..17: mol_type = other DNA
gcatcccactgctgcct

SEQ ID NO: 184750 - DNA, 17 bp, synthetic construct
  source 1..17: mol_type = other DNA
ggcatcccactgctgcc

SEQ ID NO: 184751 - DNA, 17 bp, synthetic construct
  source 1..17: mol_type = other DNA
gggcatcccactgctgc

SEQ ID NO: 184752 - DNA, 17 bp, synthetic construct
  source 1..17: mol_type = other DNA
cgggcatcccactgctg

SEQ ID NO: 184753 - DNA, 17 bp, synthetic construct
  source 1..17: mol_type = other DNA
gcgggcatcccactgct

SEQ ID NO: 184754 - DNA, 17 bp, synthetic construct
  source 1..17: mol_type = other DNA
cgcgggcatcccactgc

SEQ ID NO: 184755 - DNA, 17 bp, synthetic construct
  source 1..17: mol_type = other DNA
acgcgggcatcccactg

SEQ ID NO: 184756 - DNA, 17 bp, synthetic construct
  source 1..17: mol_type = other DNA
gacgcgggcatcccact

SEQ ID NO: 184757 - DNA, 17 bp, synthetic construct
  source 1..17: mol_type = other DNA
ggacgcgggcatcccac

SEQ ID NO: 184758 - DNA, 17 bp, synthetic construct
  source 1..17: mol_type = other DNA
tggacgcgggcatccca

SEQ ID NO: 184759 - DNA, 17 bp, synthetic construct
  source 1..17: mol_type = other DNA
ctggacgcgggcatccc

SEQ ID NO: 184760 - DNA, 17 bp, synthetic construct
  source 1..17: mol_type = other DNA
tctggacgcgggcatcc

SEQ ID NO: 184761 - DNA, 17 bp, synthetic construct
  source 1..17: mol_type = other DNA
gtctggacgcgggcatc

SEQ ID NO: 184762 - DNA, 17 bp, synthetic construct
  source 1..17: mol_type = other DNA
agtctggacgcgggcat

SEQ ID NO: 184763 - DNA, 17 bp, synthetic construct
  source 1..17: mol_type = other DNA
gagtctggacgcgggca

SEQ ID NO: 184764 - DNA, 17 bp, synthetic construct
  source 1..17: mol_type = other DNA
ggagtctggacgcgggc

SEQ ID NO: 184765 - DNA, 17 bp, synthetic construct
  source 1..17: mol_type = other DNA
tggagtctggacgcggg

SEQ ID NO: 184766 - DNA, 17 bp, synthetic construct
  source 1..17: mol_type = other DNA
gtggagtctggacgcgg

SEQ ID NO: 184767 - DNA, 17 bp, synthetic construct
  source 1..17: mol_type = other DNA
ggtggagtctggacgcg

SEQ ID NO: 184768 - DNA, 17 bp, synthetic construct
  source 1..17: mol_type = other DNA
gggtggagtctggacgc

SEQ ID NO: 184769 - DNA, 17 bp, synthetic construct
  source 1..17: mol_type = other DNA
agggtggagtctggacg

SEQ ID NO: 184770 - DNA, 17 bp, synthetic construct
  source 1..17: mol_type = other DNA
gagggtggagtctggac

SEQ ID NO: 184771 - DNA, 17 bp, synthetic construct
  source 1..17: mol_type = other DNA
cgagggtggagtctgga

SEQ ID NO: 184772 - DNA, 17 bp, synthetic construct
  source 1..17: mol_type = other DNA
ccgagggtggagtctgg

SEQ ID NO: 184773 - DNA, 17 bp, synthetic construct
  source 1..17: mol_type = other DNA
accgagggtggagtctg

SEQ ID NO: 184774 - DNA, 17 bp, synthetic construct
  source 1..17: mol_type = other DNA
gaccgagggtggagtct

SEQ ID NO: 184775 - DNA, 17 bp, synthetic construct
  source 1..17: mol_type = other DNA
ggaccgagggtggagtc

SEQ ID NO: 184776 - DNA, 17 bp, synthetic construct
  source 1..17: mol_type = other DNA
aggaccgagggtggagt

SEQ ID NO: 184777 - DNA, 17 bp, synthetic construct
  source 1..17: mol_type = other DNA
caggaccgagggtggag

SEQ ID NO: 184778 - DNA, 17 bp, synthetic construct
  source 1..17: mol_type = other DNA
ccaggaccgagggtgga

SEQ ID NO: 184779 - DNA, 17 bp, synthetic construct
  source 1..17: mol_type = other DNA
tccaggaccgagggtgg

SEQ ID NO: 184780 - DNA, 17 bp, synthetic construct
  source 1..17: mol_type = other DNA
ctccaggaccgagggtg

SEQ ID NO: 184781 - DNA, 17 bp, synthetic construct
  source 1..17: mol_type = other DNA
cctccaggaccgagggt

SEQ ID NO: 184782 - DNA, 17 bp, synthetic construct
  source 1..17: mol_type = other DNA
ccctccaggaccgaggg

SEQ ID NO: 184783 - DNA, 17 bp, synthetic construct
  source 1..17: mol_type = other DNA
gccctccaggaccgagg

SEQ ID NO: 184784 - DNA, 17 bp, synthetic construct
  source 1..17: mol_type = other DNA
ggccctccaggaccgag

SEQ ID NO: 184785 - DNA, 17 bp, synthetic construct
  source 1..17: mol_type = other DNA
tggccctccaggaccga

SEQ ID NO: 184786 - DNA, 17 bp, synthetic construct
  source 1..17: mol_type = other DNA
atggccctccaggaccg

SEQ ID NO: 184787 - DNA, 17 bp, synthetic construct
  source 1..17: mol_type = other DNA
catggccctccaggacc

SEQ ID NO: 184788 - DNA, 17 bp, synthetic construct
  source 1..17: mol_type = other DNA
ccatggccctccaggac

SEQ ID NO: 184789 - DNA, 17 bp, synthetic construct
  source 1..17: mol_type = other DNA
cccatggccctccagga

SEQ ID NO: 184790 - DNA, 17 bp, synthetic construct
  source 1..17: mol_type = other DNA
tcccatggccctccagg

SEQ ID NO: 184791 - DNA, 17 bp, synthetic construct
  source 1..17: mol_type = other DNA
ctcccatggccctccag

SEQ ID NO: 184792 - DNA, 17 bp, synthetic construct
  source 1..17: mol_type = other DNA
cctcccatggccctcca

SEQ ID NO: 184793 - DNA, 17 bp, synthetic construct
  source 1..17: mol_type = other DNA
ccctcccatggccctcc

SEQ ID NO: 184794 - DNA, 17 bp, synthetic construct
  source 1..17: mol_type = other DNA
cccctcccatggccctc

SEQ ID NO: 184795 - DNA, 17 bp, synthetic construct
  source 1..17: mol_type = other DNA
acccctcccatggccct

SEQ ID NO: 184796 - DNA, 17 bp, synthetic construct
  source 1..17: mol_type = other DNA
cacccctcccatggccc

SEQ ID NO: 184797 - DNA, 17 bp, synthetic construct
  source 1..17: mol_type = other DNA
ccacccctcccatggcc

SEQ ID NO: 184798 - DNA, 17 bp, synthetic construct
  source 1..17: mol_type = other DNA
accacccctcccatggc

SEQ ID NO: 184799 - DNA, 17 bp, synthetic construct
  source 1..17: mol_type = other DNA
gaccacccctcccatgg

SEQ ID NO: 184800 - DNA, 17 bp, synthetic construct
  source 1..17: mol_type = other DNA
ggaccacccctcccatg

SEQ ID NO: 184801 - DNA, 17 bp, synthetic construct
  source 1..17: mol_type = other DNA
gggaccacccctcccat

SEQ ID NO: 184802 - DNA, 17 bp, synthetic construct
  source 1..17: mol_type = other DNA
tgggaccacccctccca

SEQ ID NO: 184803 - DNA, 17 bp, synthetic construct
  source 1..17: mol_type = other DNA
atgggaccacccctccc

SEQ ID NO: 184804 - DNA, 17 bp, synthetic construct
  source 1..17: mol_type = other DNA
catgggaccacccctcc

SEQ ID NO: 184805 - DNA, 17 bp, synthetic construct
  source 1..17: mol_type = other DNA
ccatgggaccacccctc

SEQ ID NO: 184806 - DNA, 17 bp, synthetic construct
  source 1..17: mol_type = other DNA
cccatgggaccacccct

SEQ ID NO: 184807 - DNA, 17 bp, synthetic construct
  source 1..17: mol_type = other DNA
ccccatgggaccacccc

SEQ ID NO: 184808 - DNA, 17 bp, synthetic construct
  source 1..17: mol_type = other DNA
tccccatgggaccaccc

SEQ ID NO: 184809 - DNA, 17 bp, synthetic construct
  source 1..17: mol_type = other DNA
ctccccatgggaccacc

SEQ ID NO: 184810 - DNA, 17 bp, synthetic construct
  source 1..17: mol_type = other DNA
cctccccatgggaccac

SEQ ID NO: 184811 - DNA, 17 bp, synthetic construct
  source 1..17: mol_type = other DNA
ccctccccatgggacca

SEQ ID NO: 184812 - DNA, 17 bp, synthetic construct
  source 1..17: mol_type = other DNA
accctccccatgggacc

SEQ ID NO: 184813 - DNA, 17 bp, synthetic construct
  source 1..17: mol_type = other DNA
gaccctccccatgggac

SEQ ID NO: 184814 - DNA, 17 bp, synthetic construct
  source 1..17: mol_type = other DNA
cgaccctccccatggga

SEQ ID NO: 184815 - DNA, 17 bp, synthetic construct
  source 1..17: mol_type = other DNA
ccgaccctccccatggg

SEQ ID NO: 184816 - DNA, 17 bp, synthetic construct
  source 1..17: mol_type = other DNA
gccgaccctccccatgg

SEQ ID NO: 184817 - DNA, 17 bp, synthetic construct
  source 1..17: mol_type = other DNA
ggccgaccctccccatg

SEQ ID NO: 184818 - DNA, 17 bp, synthetic construct
  source 1..17: mol_type = other DNA
gggccgaccctccccat

SEQ ID NO: 184819 - DNA, 17 bp, synthetic construct
  source 1..17: mol_type = other DNA
tgggccgaccctcccca

SEQ ID NO: 184820 - DNA, 17 bp, synthetic construct
  source 1..17: mol_type = other DNA
ctgggccgaccctcccc

SEQ ID NO: 184821 - DNA, 17 bp, synthetic construct
  source 1..17: mol_type = other DNA
gctgggccgaccctccc

SEQ ID NO: 184822 - DNA, 17 bp, synthetic construct
  source 1..17: mol_type = other DNA
tgctgggccgaccctcc

SEQ ID NO: 184823 - DNA, 17 bp, synthetic construct
  source 1..17: mol_type = other DNA
ttgctgggccgaccctc

SEQ ID NO: 184824 - DNA, 17 bp, synthetic construct
  source 1..17: mol_type = other DNA
cttgctgggccgaccct

SEQ ID NO: 184825 - DNA, 17 bp, synthetic construct
  source 1..17: mol_type = other DNA
acttgctgggccgaccc

SEQ ID NO: 184826 - DNA, 17 bp, synthetic construct
  source 1..17: mol_type = other DNA
gacttgctgggccgacc

SEQ ID NO: 184827 - DNA, 17 bp, synthetic construct
  source 1..17: mol_type = other DNA
ggacttgctgggccgac

SEQ ID NO: 184828 - DNA, 17 bp, synthetic construct
  source 1..17: mol_type = other DNA
tggacttgctgggccga

SEQ ID NO: 184829 - DNA, 17 bp, synthetic construct
  source 1..17: mol_type = other DNA
ctggacttgctgggccg

SEQ ID NO: 184830 - DNA, 17 bp, synthetic construct
  source 1..17: mol_type = other DNA
cctggacttgctgggcc

SEQ ID NO: 184831 - DNA, 17 bp, synthetic construct
  source 1..17: mol_type = other DNA
gcctggacttgctgggc

SEQ ID NO: 184832 - DNA, 17 bp, synthetic construct
  source 1..17: mol_type = other DNA
ggcctggacttgctggg

SEQ ID NO: 184833 - DNA, 17 bp, synthetic construct
  source 1..17: mol_type = other DNA
gggcctggacttgctgg

SEQ ID NO: 184834 - DNA, 17 bp, synthetic construct
  source 1..17: mol_type = other DNA
agggcctggacttgctg

SEQ ID NO: 184835 - DNA, 17 bp, synthetic construct
  source 1..17: mol_type = other DNA
gagggcctggacttgct

SEQ ID NO: 184836 - DNA, 17 bp, synthetic construct
  source 1..17: mol_type = other DNA
tgagggcctggacttgc

SEQ ID NO: 184837 - DNA, 17 bp, synthetic construct
  source 1..17: mol_type = other DNA
ctgagggcctggacttg

SEQ ID NO: 184838 - DNA, 17 bp, synthetic construct
  source 1..17: mol_type = other DNA
tctgagggcctggactt

SEQ ID NO: 184839 - DNA, 17 bp, synthetic construct
  source 1..17: mol_type = other DNA
ctctgagggcctggact

SEQ ID NO: 184840 - DNA, 17 bp, synthetic construct
  source 1..17: mol_type = other DNA
actctgagggcctggac

SEQ ID NO: 184841 - DNA, 17 bp, synthetic construct
  source 1..17: mol_type = other DNA
cactctgagggcctgga

SEQ ID NO: 184842 - DNA, 17 bp, synthetic construct
  source 1..17: mol_type = other DNA
tcactctgagggcctgg

SEQ ID NO: 184843 - DNA, 17 bp, synthetic construct
  source 1..17: mol_type = other DNA
ctcactctgagggcctg

SEQ ID NO: 184844 - DNA, 17 bp, synthetic construct
  source 1..17: mol_type = other DNA
cctcactctgagggcct

SEQ ID NO: 184845 - DNA, 17 bp, synthetic construct
  source 1..17: mol_type = other DNA
ccctcactctgagggcc

SEQ ID NO: 184846 - DNA, 17 bp, synthetic construct
  source 1..17: mol_type = other DNA
accctcactctgagggc

SEQ ID NO: 184847 - DNA, 17 bp, synthetic construct
  source 1..17: mol_type = other DNA
gaccctcactctgaggg

SEQ ID NO: 184848 - DNA, 17 bp, synthetic construct
  source 1..17: mol_type = other DNA
ggaccctcactctgagg

SEQ ID NO: 184849 - DNA, 17 bp, synthetic construct
  source 1..17: mol_type = other DNA
tggaccctcactctgag

SEQ ID NO: 184850 - DNA, 17 bp, synthetic construct
  source 1..17: mol_type = other DNA
ctggaccctcactctga

SEQ ID NO: 184851 - DNA, 17 bp, synthetic construct
  source 1..17: mol_type = other DNA
actggaccctcactctg

SEQ ID NO: 184852 - DNA, 17 bp, synthetic construct
  source 1..17: mol_type = other DNA
cactggaccctcactct

SEQ ID NO: 184853 - DNA, 17 bp, synthetic construct
  source 1..17: mol_type = other DNA
ccactggaccctcactc

SEQ ID NO: 184854 - DNA, 17 bp, synthetic construct
  source 1..17: mol_type = other DNA
cccactggaccctcact

SEQ ID NO: 184855 - DNA, 17 bp, synthetic construct
  source 1..17: mol_type = other DNA
ccccactggaccctcac

SEQ ID NO: 184856 - DNA, 17 bp, synthetic construct
  source 1..17: mol_type = other DNA
gccccactggaccctca

SEQ ID NO: 184857 - DNA, 17 bp, synthetic construct
  source 1..17: mol_type = other DNA
agccccactggaccctc

SEQ ID NO: 184858 - DNA, 17 bp, synthetic construct
  source 1..17: mol_type = other DNA
gagccccactggaccct

SEQ ID NO: 184859 - DNA, 17 bp, synthetic construct
  source 1..17: mol_type = other DNA
ggagccccactggaccc

SEQ ID NO: 184860 - DNA, 17 bp, synthetic construct
  source 1..17: mol_type = other DNA
tggagccccactggacc

SEQ ID NO: 184861 - DNA, 17 bp, synthetic construct
  source 1..17: mol_type = other DNA
gtggagccccactggac

SEQ ID NO: 184862 - DNA, 17 bp, synthetic construct
  source 1..17: mol_type = other DNA
tgtggagccccactgga

SEQ ID NO: 184863 - DNA, 17 bp, synthetic construct
  source 1..17: mol_type = other DNA
atgtggagccccactgg

SEQ ID NO: 184864 - DNA, 17 bp, synthetic construct
  source 1..17: mol_type = other DNA
gatgtggagccccactg

SEQ ID NO: 184865 - DNA, 17 bp, synthetic construct
  source 1..17: mol_type = other DNA
agatgtggagccccact

SEQ ID NO: 184866 - DNA, 17 bp, synthetic construct
  source 1..17: mol_type = other DNA
cagatgtggagccccac

SEQ ID NO: 184867 - DNA, 17 bp, synthetic construct
  source 1..17: mol_type = other DNA
gcagatgtggagcccca

SEQ ID NO: 184868 - DNA, 17 bp, synthetic construct
  source 1..17: mol_type = other DNA
ggcagatgtggagcccc

SEQ ID NO: 184869 - DNA, 17 bp, synthetic construct
  source 1..17: mol_type = other DNA
aggcagatgtggagccc

SEQ ID NO: 184870 - DNA, 17 bp, synthetic construct
  source 1..17: mol_type = other DNA
aaggcagatgtggagcc

SEQ ID NO: 184871 - DNA, 17 bp, synthetic construct
  source 1..17: mol_type = other DNA
aaaggcagatgtggagc

SEQ ID NO: 184872 - DNA, 17 bp, synthetic construct
  source 1..17: mol_type = other DNA
gaaaggcagatgtggag

SEQ ID NO: 184873 - DNA, 17 bp, synthetic construct
  source 1..17: mol_type = other DNA
ggaaaggcagatgtgga

SEQ ID NO: 184874 - DNA, 17 bp, synthetic construct
  source 1..17: mol_type = other DNA
aggaaaggcagatgtgg

SEQ ID NO: 184875 - DNA, 17 bp, synthetic construct
  source 1..17: mol_type = other DNA
gaggaaaggcagatgtg

SEQ ID NO: 184876 - DNA, 17 bp, synthetic construct
  source 1..17: mol_type = other DNA
ggaggaaaggcagatgt

SEQ ID NO: 184877 - DNA, 17 bp, synthetic construct
  source 1..17: mol_type = other DNA
aggaggaaaggcagatg

SEQ ID NO: 184878 - DNA, 17 bp, synthetic construct
  source 1..17: mol_type = other DNA
gaggaggaaaggcagat

SEQ ID NO: 184879 - DNA, 17 bp, synthetic construct
  source 1..17: mol_type = other DNA
ggaggaggaaaggcaga

SEQ ID NO: 184880 - DNA, 17 bp, synthetic construct
  source 1..17: mol_type = other DNA
gggaggaggaaaggcag

SEQ ID NO: 184881 - DNA, 17 bp, synthetic construct
  source 1..17: mol_type = other DNA
tgggaggaggaaaggca

SEQ ID NO: 184882 - DNA, 17 bp, synthetic construct
  source 1..17: mol_type = other DNA
ctgggaggaggaaaggc

SEQ ID NO: 184883 - DNA, 17 bp, synthetic construct
  source 1..17: mol_type = other DNA
tctgggaggaggaaagg

SEQ ID NO: 184884 - DNA, 17 bp, synthetic construct
  source 1..17: mol_type = other DNA
gtctgggaggaggaaag

SEQ ID NO: 184885 - DNA, 17 bp, synthetic construct
  source 1..17: mol_type = other DNA
agtctgggaggaggaaa

SEQ ID NO: 184886 - DNA, 17 bp, synthetic construct
  source 1..17: mol_type = other DNA
gagtctgggaggaggaa

SEQ ID NO: 184887 - DNA, 17 bp, synthetic construct
  source 1..17: mol_type = other DNA
ggagtctgggaggagga

SEQ ID NO: 184888 - DNA, 17 bp, synthetic construct
  source 1..17: mol_type = other DNA
aggagtctgggaggagg

SEQ ID NO: 184889 - DNA, 17 bp, synthetic construct
  source 1..17: mol_type = other DNA
caggagtctgggaggag

SEQ ID NO: 184890 - DNA, 17 bp, synthetic construct
  source 1..17: mol_type = other DNA
acaggagtctgggagga

SEQ ID NO: 184891 - DNA, 17 bp, synthetic construct
  source 1..17: mol_type = other DNA
gacaggagtctgggagg

SEQ ID NO: 184892 - DNA, 17 bp, synthetic construct
  source 1..17: mol_type = other DNA
tgacaggagtctgggag

SEQ ID NO: 184893 - DNA, 17 bp, synthetic construct
  source 1..17: mol_type = other DNA
ttgacaggagtctggga

SEQ ID NO: 184894 - DNA, 17 bp, synthetic construct
  source 1..17: mol_type = other DNA
cttgacaggagtctggg

SEQ ID NO: 184895 - DNA, 17 bp, synthetic construct
  source 1..17: mol_type = other DNA
acttgacaggagtctgg

SEQ ID NO: 184896 - DNA, 17 bp, synthetic construct
  source 1..17: mol_type = other DNA
gacttgacaggagtctg

SEQ ID NO: 184897 - DNA, 17 bp, synthetic construct
  source 1..17: mol_type = other DNA
ggacttgacaggagtct

SEQ ID NO: 184898 - DNA, 17 bp, synthetic construct
  source 1..17: mol_type = other DNA
cggacttgacaggagtc

SEQ ID NO: 184899 - DNA, 17 bp, synthetic construct
  source 1..17: mol_type = other DNA
gcggacttgacaggagt

SEQ ID NO: 184900 - DNA, 17 bp, synthetic construct
  source 1..17: mol_type = other DNA
tgcggacttgacaggag

SEQ ID NO: 184901 - DNA, 17 bp, synthetic construct
  source 1..17: mol_type = other DNA
atgcggacttgacagga

SEQ ID NO: 184902 - DNA, 17 bp, synthetic construct
  source 1..17: mol_type = other DNA
gatgcggacttgacagg

SEQ ID NO: 184903 - DNA, 17 bp, synthetic construct
  source 1..17: mol_type = other DNA
tgatgcggacttgacag

SEQ ID NO: 184904 - DNA, 17 bp, synthetic construct
  source 1..17: mol_type = other DNA
ttgatgcggacttgaca

SEQ ID NO: 184905 - DNA, 17 bp, synthetic construct
  source 1..17: mol_type = other DNA
gttgatgcggacttgac

SEQ ID NO: 184906 - DNA, 17 bp, synthetic construct
  source 1..17: mol_type = other DNA
tgttgatgcggacttga

SEQ ID NO: 184907 - DNA, 17 bp, synthetic construct
  source 1..17: mol_type = other DNA
gtgttgatgcggacttg

SEQ ID NO: 184908 - DNA, 17 bp, synthetic construct
  source 1..17: mol_type = other DNA
cgtgttgatgcggactt

SEQ ID NO: 184909 - DNA, 17 bp, synthetic construct
  source 1..17: mol_type = other DNA
tcgtgttgatgcggact

SEQ ID NO: 184910 - DNA, 17 bp, synthetic construct
  source 1..17: mol_type = other DNA
gtcgtgttgatgcggac

SEQ ID NO: 184911 - DNA, 17 bp, synthetic construct
  source 1..17: mol_type = other DNA
ggtcgtgttgatgcgga

SEQ ID NO: 184912 - DNA, 17 bp, synthetic construct
  source 1..17: mol_type = other DNA
tggtcgtgttgatgcgg

SEQ ID NO: 184913 - DNA, 17 bp, synthetic construct
  source 1..17: mol_type = other DNA
atggtcgtgttgatgcg

SEQ ID NO: 184914 - DNA, 17 bp, synthetic construct
  source 1..17: mol_type = other DNA
gatggtcgtgttgatgc

SEQ ID NO: 184915 - DNA, 17 bp, synthetic construct
  source 1..17: mol_type = other DNA
ggatggtcgtgttgatg

SEQ ID NO: 184916 - DNA, 17 bp, synthetic construct
  source 1..17: mol_type = other DNA
aggatggtcgtgttgat

SEQ ID NO: 184917 - DNA, 17 bp, synthetic construct
  source 1..17: mol_type = other DNA
caggatggtcgtgttga

SEQ ID NO: 184918 - DNA, 17 bp, synthetic construct
  source 1..17: mol_type = other DNA
acaggatggtcgtgttg

SEQ ID NO: 184919 - DNA, 17 bp, synthetic construct
  source 1..17: mol_type = other DNA
cacaggatggtcgtgtt

SEQ ID NO: 184920 - DNA, 17 bp, synthetic construct
  source 1..17: mol_type = other DNA
ccacaggatggtcgtgt

SEQ ID NO: 184921 - DNA, 17 bp, synthetic construct
  source 1..17: mol_type = other DNA
gccacaggatggtcgtg

SEQ ID NO: 184922 - DNA, 17 bp, synthetic construct
  source 1..17: mol_type = other DNA
tgccacaggatggtcgt

SEQ ID NO: 184923 - DNA, 17 bp, synthetic construct
  source 1..17: mol_type = other DNA
gtgccacaggatggtcg

SEQ ID NO: 184924 - DNA, 17 bp, synthetic construct
  source 1..17: mol_type = other DNA
ggtgccacaggatggtc

SEQ ID NO: 184925 - DNA, 17 bp, synthetic construct
  source 1..17: mol_type = other DNA
tggtgccacaggatggt

SEQ ID NO: 184926 - DNA, 17 bp, synthetic construct
  source 1..17: mol_type = other DNA
ctggtgccacaggatgg

SEQ ID NO: 184927 - DNA, 17 bp, synthetic construct
  source 1..17: mol_type = other DNA
cctggtgccacaggatg

SEQ ID NO: 184928 - DNA, 17 bp, synthetic construct
  source 1..17: mol_type = other DNA
ccctggtgccacaggat

SEQ ID NO: 184929 - DNA, 17 bp, synthetic construct
  source 1..17: mol_type = other DNA
gccctggtgccacagga

SEQ ID NO: 184930 - DNA, 17 bp, synthetic construct
  source 1..17: mol_type = other DNA
agccctggtgccacagg

SEQ ID NO: 184931 - DNA, 17 bp, synthetic construct
  source 1..17: mol_type = other DNA
cagccctggtgccacag

SEQ ID NO: 184932 - DNA, 17 bp, synthetic construct
  source 1..17: mol_type = other DNA
gcagccctggtgccaca

SEQ ID NO: 184933 - DNA, 17 bp, synthetic construct
  source 1..17: mol_type = other DNA
cgcagccctggtgccac

SEQ ID NO: 184934 - DNA, 17 bp, synthetic construct
  source 1..17: mol_type = other DNA
tcgcagccctggtgcca

SEQ ID NO: 184935 - DNA, 17 bp, synthetic construct
  source 1..17: mol_type = other DNA
ctcgcagccctggtgcc

SEQ ID NO: 184936 - DNA, 17 bp, synthetic construct
  source 1..17: mol_type = other DNA
tctcgcagccctggtgc

SEQ ID NO: 184937 - DNA, 17 bp, synthetic construct
  source 1..17: mol_type = other DNA
gtctcgcagccctggtg

SEQ ID NO: 184938 - DNA, 17 bp, synthetic construct
  source 1..17: mol_type = other DNA
ggtctcgcagccctggt

SEQ ID NO: 184939 - DNA, 17 bp, synthetic construct
  source 1..17: mol_type = other DNA
cggtctcgcagccctgg

SEQ ID NO: 184940 - DNA, 17 bp, synthetic construct
  source 1..17: mol_type = other DNA
tcggtctcgcagccctg

SEQ ID NO: 184941 - DNA, 17 bp, synthetic construct
  source 1..17: mol_type = other DNA
ctcggtctcgcagccct

SEQ ID NO: 184942 - DNA, 17 bp, synthetic construct
  source 1..17: mol_type = other DNA
cctcggtctcgcagccc

SEQ ID NO: 184943 - DNA, 17 bp, synthetic construct
  source 1..17: mol_type = other DNA
acctcggtctcgcagcc

SEQ ID NO: 184944 - DNA, 17 bp, synthetic construct
  source 1..17: mol_type = other DNA
gacctcggtctcgcagc

SEQ ID NO: 184945 - DNA, 17 bp, synthetic construct
  source 1..17: mol_type = other DNA
tgacctcggtctcgcag

SEQ ID NO: 184946 - DNA, 17 bp, synthetic construct
  source 1..17: mol_type = other DNA
ttgacctcggtctcgca

SEQ ID NO: 184947 - DNA, 17 bp, synthetic construct
  source 1..17: mol_type = other DNA
gttgacctcggtctcgc

SEQ ID NO: 184948 - DNA, 17 bp, synthetic construct
  source 1..17: mol_type = other DNA
tgttgacctcggtctcg

SEQ ID NO: 184949 - DNA, 17 bp, synthetic construct
  source 1..17: mol_type = other DNA
atgttgacctcggtctc

SEQ ID NO: 184950 - DNA, 17 bp, synthetic construct
  source 1..17: mol_type = other DNA
gatgttgacctcggtct

SEQ ID NO: 184951 - DNA, 17 bp, synthetic construct
  source 1..17: mol_type = other DNA
tgatgttgacctcggtc

SEQ ID NO: 184952 - DNA, 17 bp, synthetic construct
  source 1..17: mol_type = other DNA
gtgatgttgacctcggt

SEQ ID NO: 184953 - DNA, 17 bp, synthetic construct
  source 1..17: mol_type = other DNA
ggtgatgttgacctcgg

SEQ ID NO: 184954 - DNA, 17 bp, synthetic construct
  source 1..17: mol_type = other DNA
aggtgatgttgacctcg

SEQ ID NO: 184955 - DNA, 17 bp, synthetic construct
  source 1..17: mol_type = other DNA
aaggtgatgttgacctc

SEQ ID NO: 184956 - DNA, 17 bp, synthetic construct
  source 1..17: mol_type = other DNA
gaaggtgatgttgacct

SEQ ID NO: 184957 - DNA, 17 bp, synthetic construct
  source 1..17: mol_type = other DNA
agaaggtgatgttgacc

SEQ ID NO: 184958 - DNA, 17 bp, synthetic construct
  source 1..17: mol_type = other DNA
cagaaggtgatgttgac

SEQ ID NO: 184959 - DNA, 17 bp, synthetic construct
  source 1..17: mol_type = other DNA
gcagaaggtgatgttga

SEQ ID NO: 184960 - DNA, 17 bp, synthetic construct
  source 1..17: mol_type = other DNA
cgcagaaggtgatgttg

SEQ ID NO: 184961 - DNA, 17 bp, synthetic construct
  source 1..17: mol_type = other DNA
tcgcagaaggtgatgtt

SEQ ID NO: 184962 - DNA, 17 bp, synthetic construct
  source 1..17: mol_type = other DNA
ctcgcagaaggtgatgt

SEQ ID NO: 184963 - DNA, 17 bp, synthetic construct
  source 1..17: mol_type = other DNA
cctcgcagaaggtgatg

SEQ ID NO: 184964 - DNA, 17 bp, synthetic construct
  source 1..17: mol_type = other DNA
ccctcgcagaaggtgat

SEQ ID NO: 184965 - DNA, 17 bp, synthetic construct
  source 1..17: mol_type = other DNA
gccctcgcagaaggtga

SEQ ID NO: 184966 - DNA, 17 bp, synthetic construct
  source 1..17: mol_type = other DNA
agccctcgcagaaggtg

SEQ ID NO: 184967 - DNA, 17 bp, synthetic construct
  source 1..17: mol_type = other DNA
gagccctcgcagaaggt

SEQ ID NO: 184968 - DNA, 17 bp, synthetic construct
  source 1..17: mol_type = other DNA
ggagccctcgcagaagg

SEQ ID NO: 184969 - DNA, 17 bp, synthetic construct
  source 1..17: mol_type = other DNA
aggagccctcgcagaag

SEQ ID NO: 184970 - DNA, 17 bp, synthetic construct
  source 1..17: mol_type = other DNA
caggagccctcgcagaa

SEQ ID NO: 184971 - DNA, 17 bp, synthetic construct
  source 1..17: mol_type = other DNA
gcaggagccctcgcaga

SEQ ID NO: 184972 - DNA, 17 bp, synthetic construct
  source 1..17: mol_type = other DNA
ggcaggagccctcgcag

SEQ ID NO: 184973 - DNA, 17 bp, synthetic construct
  source 1..17: mol_type = other DNA
gggcaggagccctcgca

SEQ ID NO: 184974 - DNA, 17 bp, synthetic construct
  source 1..17: mol_type = other DNA
ggggcaggagccctcgc

SEQ ID NO: 184975 - DNA, 17 bp, synthetic construct
  source 1..17: mol_type = other DNA
cggggcaggagccctcg

SEQ ID NO: 184976 - DNA, 17 bp, synthetic construct
  source 1..17: mol_type = other DNA
ccggggcaggagccctc

SEQ ID NO: 184977 - DNA, 17 bp, synthetic construct
  source 1..17: mol_type = other DNA
tccggggcaggagccct

SEQ ID NO: 184978 - DNA, 17 bp, synthetic construct
  source 1..17: mol_type = other DNA
ctccggggcaggagccc

SEQ ID NO: 184979 - DNA, 17 bp, synthetic construct
  source 1..17: mol_type = other DNA
gctccggggcaggagcc

SEQ ID NO: 184980 - DNA, 17 bp, synthetic construct
  source 1..17: mol_type = other DNA
cgctccggggcaggagc

SEQ ID NO: 184981 - DNA, 17 bp, synthetic construct
  source 1..17: mol_type = other DNA
acgctccggggcaggag

SEQ ID NO: 184982 - DNA, 17 bp, synthetic construct
  source 1..17: mol_type = other DNA
gacgctccggggcagga

SEQ ID NO: 184983 - DNA, 17 bp, synthetic construct
  source 1..17: mol_type = other DNA
ggacgctccggggcagg

SEQ ID NO: 184984 - DNA, 17 bp, synthetic construct
  source 1..17: mol_type = other DNA
tggacgctccggggcag

SEQ ID NO: 184985 - DNA, 17 bp, synthetic construct
  source 1..17: mol_type = other DNA
ttggacgctccggggca

SEQ ID NO: 184986 - DNA, 17 bp, synthetic construct
  source 1..17: mol_type = other DNA
cttggacgctccggggc

SEQ ID NO: 184987 - DNA, 17 bp, synthetic construct
  source 1..17: mol_type = other DNA
acttggacgctccgggg

SEQ ID NO: 184988 - DNA, 17 bp, synthetic construct
  source 1..17: mol_type = other DNA
cacttggacgctccggg

SEQ ID NO: 184989 - DNA, 17 bp, synthetic construct
  source 1..17: mol_type = other DNA
tcacttggacgctccgg

SEQ ID NO: 184990 - DNA, 17 bp, synthetic construct
  source 1..17: mol_type = other DNA
ctcacttggacgctccg

SEQ ID NO: 184991 - DNA, 17 bp, synthetic construct
  source 1..17: mol_type = other DNA
actcacttggacgctcc

SEQ ID NO: 184992 - DNA, 17 bp, synthetic construct
  source 1..17: mol_type = other DNA
cactcacttggacgctc

SEQ ID NO: 184993 - DNA, 17 bp, synthetic construct
  source 1..17: mol_type = other DNA
ccactcacttggacgct

SEQ ID NO: 184994 - DNA, 17 bp, synthetic construct
  source 1..17: mol_type = other DNA
cccactcacttggacgc

SEQ ID NO: 184995 - DNA, 17 bp, synthetic construct
  source 1..17: mol_type = other DNA
gcccactcacttggacg

SEQ ID NO: 184996 - DNA, 17 bp, synthetic construct
  source 1..17: mol_type = other DNA
agcccactcacttggac

SEQ ID NO: 184997 - DNA, 17 bp, synthetic construct
  source 1..17: mol_type = other DNA
gagcccactcacttgga

SEQ ID NO: 184998 - DNA, 17 bp, synthetic construct
  source 1..17: mol_type = other DNA
ggagcccactcacttgg

SEQ ID NO: 184999 - DNA, 17 bp, synthetic construct
  source 1..17: mol_type = other DNA
aggagcccactcacttg

SEQ ID NO: 185000 - DNA, 17 bp, synthetic construct
  source 1..17: mol_type = other DNA
caggagcccactcactt

SEQ ID NO: 185001 - DNA, 17 bp, synthetic construct
  source 1..17: mol_type = other DNA
ccaggagcccactcact

SEQ ID NO: 185002 - DNA, 17 bp, synthetic construct
  source 1..17: mol_type = other DNA
gccaggagcccactcac

SEQ ID NO: 185003 - DNA, 17 bp, synthetic construct
  source 1..17: mol_type = other DNA
ggccaggagcccactca

SEQ ID NO: 185004 - DNA, 17 bp, synthetic construct
  source 1..17: mol_type = other DNA
gggccaggagcccactc

SEQ ID NO: 185005 - DNA, 17 bp, synthetic construct
  source 1..17: mol_type = other DNA
agggccaggagcccact

SEQ ID NO: 185006 - DNA, 17 bp, synthetic construct
  source 1..17: mol_type = other DNA
cagggccaggagcccac

SEQ ID NO: 185007 - DNA, 17 bp, synthetic construct
  source 1..17: mol_type = other DNA
acagggccaggagccca

SEQ ID NO: 185008 - DNA, 17 bp, synthetic construct
  source 1..17: mol_type = other DNA
cacagggccaggagccc

SEQ ID NO: 185009 - DNA, 17 bp, synthetic construct
  source 1..17: mol_type = other DNA
gcacagggccaggagcc

SEQ ID NO: 185010 - DNA, 17 bp, synthetic construct
  source 1..17: mol_type = other DNA
ggcacagggccaggagc

SEQ ID NO: 185011 - DNA, 17 bp, synthetic construct
  source 1..17: mol_type = other DNA
tggcacagggccaggag

SEQ ID NO: 185012 - DNA, 17 bp, synthetic construct
  source 1..17: mol_type = other DNA
ttggcacagggccagga

SEQ ID NO: 185013 - DNA, 17 bp, synthetic construct
  source 1..17: mol_type = other DNA
cttggcacagggccagg

SEQ ID NO: 185014 - DNA, 17 bp, synthetic construct
  source 1..17: mol_type = other DNA
tcttggcacagggccag

SEQ ID NO: 185015 - DNA, 17 bp, synthetic construct
  source 1..17: mol_type = other DNA
ctcttggcacagggcca

SEQ ID NO: 185016 - DNA, 17 bp, synthetic construct
  source 1..17: mol_type = other DNA
gctcttggcacagggcc

SEQ ID NO: 185017 - DNA, 17 bp, synthetic construct
  source 1..17: mol_type = other DNA
tgctcttggcacagggc

SEQ ID NO: 185018 - DNA, 17 bp, synthetic construct
  source 1..17: mol_type = other DNA
gtgctcttggcacaggg

SEQ ID NO: 185019 - DNA, 17 bp, synthetic construct
  source 1..17: mol_type = other DNA
ggtgctcttggcacagg

SEQ ID NO: 185020 - DNA, 17 bp, synthetic construct
  source 1..17: mol_type = other DNA
aggtgctcttggcacag

SEQ ID NO: 185021 - DNA, 17 bp, synthetic construct
  source 1..17: mol_type = other DNA
caggtgctcttggcaca

SEQ ID NO: 185022 - DNA, 17 bp, synthetic construct
  source 1..17: mol_type = other DNA
gcaggtgctcttggcac

SEQ ID NO: 185023 - DNA, 17 bp, synthetic construct
  source 1..17: mol_type = other DNA
cgcaggtgctcttggca

SEQ ID NO: 185024 - DNA, 17 bp, synthetic construct
  source 1..17: mol_type = other DNA
acgcaggtgctcttggc

SEQ ID NO: 185025 - DNA, 17 bp, synthetic construct
  source 1..17: mol_type = other DNA
cacgcaggtgctcttgg

SEQ ID NO: 185026 - DNA, 17 bp, synthetic construct
  source 1..17: mol_type = other DNA
acacgcaggtgctcttg

SEQ ID NO: 185027 - DNA, 17 bp, synthetic construct
  source 1..17: mol_type = other DNA
cacacgcaggtgctctt

SEQ ID NO: 185028 - DNA, 17 bp, synthetic construct
  source 1..17: mol_type = other DNA
ccacacgcaggtgctct

SEQ ID NO: 185029 - DNA, 17 bp, synthetic construct
  source 1..17: mol_type = other DNA
accacacgcaggtgctc

SEQ ID NO: 185030 - DNA, 17 bp, synthetic construct
  source 1..17: mol_type = other DNA
caccacacgcaggtgct

SEQ ID NO: 185031 - DNA, 17 bp, synthetic construct
  source 1..17: mol_type = other DNA
ccaccacacgcaggtgc

SEQ ID NO: 185032 - DNA, 17 bp, synthetic construct
  source 1..17: mol_type = other DNA
cccaccacacgcaggtg

SEQ ID NO: 185033 - DNA, 17 bp, synthetic construct
  source 1..17: mol_type = other DNA
acccaccacacgcaggt

SEQ ID NO: 185034 - DNA, 17 bp, synthetic construct
  source 1..17: mol_type = other DNA
gacccaccacacgcagg

SEQ ID NO: 185035 - DNA, 17 bp, synthetic construct
  source 1..17: mol_type = other DNA
ggacccaccacacgcag

SEQ ID NO: 185036 - DNA, 17 bp, synthetic construct
  source 1..17: mol_type = other DNA
cggacccaccacacgca

SEQ ID NO: 185037 - DNA, 17 bp, synthetic construct
  source 1..17: mol_type = other DNA
gcggacccaccacacgc

SEQ ID NO: 185038 - DNA, 17 bp, synthetic construct
  source 1..17: mol_type = other DNA
ggcggacccaccacacg

SEQ ID NO: 185039 - DNA, 17 bp, synthetic construct
  source 1..17: mol_type = other DNA
gggcggacccaccacac

SEQ ID NO: 185040 - DNA, 17 bp, synthetic construct
  source 1..17: mol_type = other DNA
agggcggacccaccaca

SEQ ID NO: 185041 - DNA, 17 bp, synthetic construct
  source 1..17: mol_type = other DNA
cagggcggacccaccac

SEQ ID NO: 185042 - DNA, 17 bp, synthetic construct
  source 1..17: mol_type = other DNA
ccagggcggacccacca

SEQ ID NO: 185043 - DNA, 17 bp, synthetic construct
  source 1..17: mol_type = other DNA
gccagggcggacccacc

SEQ ID NO: 185044 - DNA, 17 bp, synthetic construct
  source 1..17: mol_type = other DNA
ggccagggcggacccac

SEQ ID NO: 185045 - DNA, 17 bp, synthetic construct
  source 1..17: mol_type = other DNA
gggccagggcggaccca

SEQ ID NO: 185046 - DNA, 17 bp, synthetic construct
  source 1..17: mol_type = other DNA
cgggccagggcggaccc

SEQ ID NO: 185047 - DNA, 17 bp, synthetic construct
  source 1..17: mol_type = other DNA
acgggccagggcggacc

SEQ ID NO: 185048 - DNA, 17 bp, synthetic construct
  source 1..17: mol_type = other DNA
gacgggccagggcggac

SEQ ID NO: 185049 - DNA, 17 bp, synthetic construct
  source 1..17: mol_type = other DNA
tgacgggccagggcgga

SEQ ID NO: 185050 - DNA, 17 bp, synthetic construct
  source 1..17: mol_type = other DNA
ctgacgggccagggcgg

SEQ ID NO: 185051 - DNA, 17 bp, synthetic construct
  source 1..17: mol_type = other DNA
gctgacgggccagggcg

SEQ ID NO: 185052 - DNA, 17 bp, synthetic construct
  source 1..17: mol_type = other DNA
agctgacgggccagggc

SEQ ID NO: 185053 - DNA, 17 bp, synthetic construct
  source 1..17: mol_type = other DNA
cagctgacgggccaggg

SEQ ID NO: 185054 - DNA, 17 bp, synthetic construct
  source 1..17: mol_type = other DNA
ccagctgacgggccagg

SEQ ID NO: 185055 - DNA, 17 bp, synthetic construct
  source 1..17: mol_type = other DNA
gccagctgacgggccag

SEQ ID NO: 185056 - DNA, 17 bp, synthetic construct
  source 1..17: mol_type = other DNA
agccagctgacgggcca

SEQ ID NO: 185057 - DNA, 17 bp, synthetic construct
  source 1..17: mol_type = other DNA
cagccagctgacgggcc

SEQ ID NO: 185058 - DNA, 17 bp, synthetic construct
  source 1..17: mol_type = other DNA
ccagccagctgacgggc

SEQ ID NO: 185059 - DNA, 17 bp, synthetic construct
  source 1..17: mol_type = other DNA
gccagccagctgacggg

SEQ ID NO: 185060 - DNA, 17 bp, synthetic construct
  source 1..17: mol_type = other DNA
tgccagccagctgacgg

SEQ ID NO: 185061 - DNA, 17 bp, synthetic construct
  source 1..17: mol_type = other DNA
ctgccagccagctgacg

SEQ ID NO: 185062 - DNA, 17 bp, synthetic construct
  source 1..17: mol_type = other DNA
gctgccagccagctgac

SEQ ID NO: 185063 - DNA, 17 bp, synthetic construct
  source 1..17: mol_type = other DNA
ggctgccagccagctga

SEQ ID NO: 185064 - DNA, 17 bp, synthetic construct
  source 1..17: mol_type = other DNA
aggctgccagccagctg

SEQ ID NO: 185065 - DNA, 17 bp, synthetic construct
  source 1..17: mol_type = other DNA
caggctgccagccagct

SEQ ID NO: 185066 - DNA, 17 bp, synthetic construct
  source 1..17: mol_type = other DNA
gcaggctgccagccagc

SEQ ID NO: 185067 - DNA, 17 bp, synthetic construct
  source 1..17: mol_type = other DNA
agcaggctgccagccag

SEQ ID NO: 185068 - DNA, 17 bp, synthetic construct
  source 1..17: mol_type = other DNA
gagcaggctgccagcca

SEQ ID NO: 185069 - DNA, 17 bp, synthetic construct
  source 1..17: mol_type = other DNA
agagcaggctgccagcc

SEQ ID NO: 185070 - DNA, 17 bp, synthetic construct
  source 1..17: mol_type = other DNA
cagagcaggctgccagc

SEQ ID NO: 185071 - DNA, 17 bp, synthetic construct
  source 1..17: mol_type = other DNA
ccagagcaggctgccag

SEQ ID NO: 185072 - DNA, 17 bp, synthetic construct
  source 1..17: mol_type = other DNA
cccagagcaggctgcca

SEQ ID NO: 185073 - DNA, 17 bp, synthetic construct
  source 1..17: mol_type = other DNA
acccagagcaggctgcc

SEQ ID NO: 185074 - DNA, 17 bp, synthetic construct
  source 1..17: mol_type = other DNA
gacccagagcaggctgc

SEQ ID NO: 185075 - DNA, 17 bp, synthetic construct
  source 1..17: mol_type = other DNA
tgacccagagcaggctg

SEQ ID NO: 185076 - DNA, 17 bp, synthetic construct
  source 1..17: mol_type = other DNA
ctgacccagagcaggct

SEQ ID NO: 185077 - DNA, 17 bp, synthetic construct
  source 1..17: mol_type = other DNA
cctgacccagagcaggc

SEQ ID NO: 185078 - DNA, 17 bp, synthetic construct
  source 1..17: mol_type = other DNA
tcctgacccagagcagg

SEQ ID NO: 185079 - DNA, 17 bp, synthetic construct
  source 1..17: mol_type = other DNA
ctcctgacccagagcag

SEQ ID NO: 185080 - DNA, 17 bp, synthetic construct
  source 1..17: mol_type = other DNA
cctcctgacccagagca

SEQ ID NO: 185081 - DNA, 17 bp, synthetic construct
  source 1..17: mol_type = other DNA
ccctcctgacccagagc

SEQ ID NO: 185082 - DNA, 17 bp, synthetic construct
  source 1..17: mol_type = other DNA
gccctcctgacccagag

SEQ ID NO: 185083 - DNA, 17 bp, synthetic construct
  source 1..17: mol_type = other DNA
ggccctcctgacccaga

SEQ ID NO: 185084 - DNA, 17 bp, synthetic construct
  source 1..17: mol_type = other DNA
aggccctcctgacccag

SEQ ID NO: 185085 - DNA, 17 bp, synthetic construct
  source 1..17: mol_type = other DNA
taggccctcctgaccca

SEQ ID NO: 185086 - DNA, 17 bp, synthetic construct
  source 1..17: mol_type = other DNA
gtaggccctcctgaccc

SEQ ID NO: 185087 - DNA, 17 bp, synthetic construct
  source 1..17: mol_type = other DNA
cgtaggccctcctgacc

SEQ ID NO: 185088 - DNA, 17 bp, synthetic construct
  source 1..17: mol_type = other DNA
gcgtaggccctcctgac

SEQ ID NO: 185089 - DNA, 17 bp, synthetic construct
  source 1..17: mol_type = other DNA
ggcgtaggccctcctga

SEQ ID NO: 185090 - DNA, 17 bp, synthetic construct
  source 1..17: mol_type = other DNA
tggcgtaggccctcctg

SEQ ID NO: 185091 - DNA, 17 bp, synthetic construct
  source 1..17: mol_type = other DNA
ctggcgtaggccctcct

SEQ ID NO: 185092 - DNA, 17 bp, synthetic construct
  source 1..17: mol_type = other DNA
gctggcgtaggccctcc

SEQ ID NO: 185093 - DNA, 17 bp, synthetic construct
  source 1..17: mol_type = other DNA
agctggcgtaggccctc

SEQ ID NO: 185094 - DNA, 17 bp, synthetic construct
  source 1..17: mol_type = other DNA
gagctggcgtaggccct

SEQ ID NO: 185095 - DNA, 17 bp, synthetic construct
  source 1..17: mol_type = other DNA
ggagctggcgtaggccc

SEQ ID NO: 185096 - DNA, 17 bp, synthetic construct
  source 1..17: mol_type = other DNA
tggagctggcgtaggcc

SEQ ID NO: 185097 - DNA, 17 bp, synthetic construct
  source 1..17: mol_type = other DNA
ctggagctggcgtaggc

SEQ ID NO: 185098 - DNA, 17 bp, synthetic construct
  source 1..17: mol_type = other DNA
cctggagctggcgtagg

SEQ ID NO: 185099 - DNA, 17 bp, synthetic construct
  source 1..17: mol_type = other DNA
tcctggagctggcgtag

SEQ ID NO: 185100 - DNA, 17 bp, synthetic construct
  source 1..17: mol_type = other DNA
ttcctggagctggcgta

SEQ ID NO: 185101 - DNA, 17 bp, synthetic construct
  source 1..17: mol_type = other DNA
cttcctggagctggcgt

SEQ ID NO: 185102 - DNA, 17 bp, synthetic construct
  source 1..17: mol_type = other DNA
ccttcctggagctggcg

SEQ ID NO: 185103 - DNA, 17 bp, synthetic construct
  source 1..17: mol_type = other DNA
tccttcctggagctggc

SEQ ID NO: 185104 - DNA, 17 bp, synthetic construct
  source 1..17: mol_type = other DNA
ctccttcctggagctgg

SEQ ID NO: 185105 - DNA, 17 bp, synthetic construct
  source 1..17: mol_type = other DNA
cctccttcctggagctg

SEQ ID NO: 185106 - DNA, 17 bp, synthetic construct
  source 1..17: mol_type = other DNA
ccctccttcctggagct

SEQ ID NO: 185107 - DNA, 17 bp, synthetic construct
  source 1..17: mol_type = other DNA
tccctccttcctggagc

SEQ ID NO: 185108 - DNA, 17 bp, synthetic construct
  source 1..17: mol_type = other DNA
ttccctccttcctggag

SEQ ID NO: 185109 - DNA, 17 bp, synthetic construct
  source 1..17: mol_type = other DNA
cttccctccttcctgga

SEQ ID NO: 185110 - DNA, 17 bp, synthetic construct
  source 1..17: mol_type = other DNA
ccttccctccttcctgg

SEQ ID NO: 185111 - DNA, 17 bp, synthetic construct
  source 1..17: mol_type = other DNA
cccttccctccttcctg

SEQ ID NO: 185112 - DNA, 17 bp, synthetic construct
  source 1..17: mol_type = other DNA
ccccttccctccttcct

SEQ ID NO: 185113 - DNA, 17 bp, synthetic construct
  source 1..17: mol_type = other DNA
gccccttccctccttcc

SEQ ID NO: 185114 - DNA, 17 bp, synthetic construct
  source 1..17: mol_type = other DNA
agccccttccctccttc

SEQ ID NO: 185115 - DNA, 17 bp, synthetic construct
  source 1..17: mol_type = other DNA
gagccccttccctcctt

SEQ ID NO: 185116 - DNA, 17 bp, synthetic construct
  source 1..17: mol_type = other DNA
ggagccccttccctcct

SEQ ID NO: 185117 - DNA, 17 bp, synthetic construct
  source 1..17: mol_type = other DNA
gggagccccttccctcc

SEQ ID NO: 185118 - DNA, 17 bp, synthetic construct
  source 1..17: mol_type = other DNA
ggggagccccttccctc

SEQ ID NO: 185119 - DNA, 17 bp, synthetic construct
  source 1..17: mol_type = other DNA
tggggagccccttccct

SEQ ID NO: 185120 - DNA, 17 bp, synthetic construct
  source 1..17: mol_type = other DNA
ctggggagccccttccc

SEQ ID NO: 185121 - DNA, 17 bp, synthetic construct
  source 1..17: mol_type = other DNA
gctggggagccccttcc

SEQ ID NO: 185122 - DNA, 17 bp, synthetic construct
  source 1..17: mol_type = other DNA
tgctggggagccccttc

SEQ ID NO: 185123 - DNA, 17 bp, synthetic construct
  source 1..17: mol_type = other DNA
ctgctggggagcccctt

SEQ ID NO: 185124 - DNA, 17 bp, synthetic construct
  source 1..17: mol_type = other DNA
cctgctggggagcccct

SEQ ID NO: 185125 - DNA, 17 bp, synthetic construct
  source 1..17: mol_type = other DNA
ccctgctggggagcccc

SEQ ID NO: 185126 - DNA, 17 bp, synthetic construct
  source 1..17: mol_type = other DNA
gccctgctggggagccc

SEQ ID NO: 185127 - DNA, 17 bp, synthetic construct
  source 1..17: mol_type = other DNA
agccctgctggggagcc

SEQ ID NO: 185128 - DNA, 17 bp, synthetic construct
  source 1..17: mol_type = other DNA
gagccctgctggggagc

SEQ ID NO: 185129 - DNA, 17 bp, synthetic construct
  source 1..17: mol_type = other DNA
ggagccctgctggggag

SEQ ID NO: 185130 - DNA, 17 bp, synthetic construct
  source 1..17: mol_type = other DNA
gggagccctgctgggga

SEQ ID NO: 185131 - DNA, 17 bp, synthetic construct
  source 1..17: mol_type = other DNA
ggggagccctgctgggg

SEQ ID NO: 185132 - DNA, 17 bp, synthetic construct
  source 1..17: mol_type = other DNA
gggggagccctgctggg

SEQ ID NO: 185133 - DNA, 17 bp, synthetic construct
  source 1..17: mol_type = other DNA
agggggagccctgctgg

SEQ ID NO: 185134 - DNA, 17 bp, synthetic construct
  source 1..17: mol_type = other DNA
gagggggagccctgctg

SEQ ID NO: 185135 - DNA, 17 bp, synthetic construct
  source 1..17: mol_type = other DNA
agagggggagccctgct

SEQ ID NO: 185136 - DNA, 17 bp, synthetic construct
  source 1..17: mol_type = other DNA
gagagggggagccctgc

SEQ ID NO: 185137 - DNA, 17 bp, synthetic construct
  source 1..17: mol_type = other DNA
ggagagggggagccctg

SEQ ID NO: 185138 - DNA, 17 bp, synthetic construct
  source 1..17: mol_type = other DNA
tggagagggggagccct

SEQ ID NO: 185139 - DNA, 17 bp, synthetic construct
  source 1..17: mol_type = other DNA
gtggagagggggagccc

SEQ ID NO: 185140 - DNA, 17 bp, synthetic construct
  source 1..17: mol_type = other DNA
cgtggagagggggagcc

SEQ ID NO: 185141 - DNA, 17 bp, synthetic construct
  source 1..17: mol_type = other DNA
acgtggagagggggagc

SEQ ID NO: 185142 - DNA, 17 bp, synthetic construct
  source 1..17: mol_type = other DNA
gacgtggagagggggag

SEQ ID NO: 185143 - DNA, 17 bp, synthetic construct
  source 1..17: mol_type = other DNA
ggacgtggagaggggga

SEQ ID NO: 185144 - DNA, 17 bp, synthetic construct
  source 1..17: mol_type = other DNA
tggacgtggagaggggg

SEQ ID NO: 185145 - DNA, 17 bp, synthetic construct
  source 1..17: mol_type = other DNA
atggacgtggagagggg

SEQ ID NO: 185146 - DNA, 17 bp, synthetic construct
  source 1..17: mol_type = other DNA
aatggacgtggagaggg

SEQ ID NO: 185147 - DNA, 17 bp, synthetic construct
  source 1..17: mol_type = other DNA
caatggacgtggagagg

SEQ ID NO: 185148 - DNA, 17 bp, synthetic construct
  source 1..17: mol_type = other DNA
ccaatggacgtggagag

SEQ ID NO: 185149 - DNA, 17 bp, synthetic construct
  source 1..17: mol_type = other DNA
gccaatggacgtggaga

SEQ ID NO: 185150 - DNA, 17 bp, synthetic construct
  source 1..17: mol_type = other DNA
tgccaatggacgtggag

SEQ ID NO: 185151 - DNA, 17 bp, synthetic construct
  source 1..17: mol_type = other DNA
ctgccaatggacgtgga

SEQ ID NO: 185152 - DNA, 17 bp, synthetic construct
  source 1..17: mol_type = other DNA
tctgccaatggacgtgg

SEQ ID NO: 185153 - DNA, 17 bp, synthetic construct
  source 1..17: mol_type = other DNA
ttctgccaatggacgtg

SEQ ID NO: 185154 - DNA, 17 bp, synthetic construct
  source 1..17: mol_type = other DNA
tttctgccaatggacgt

SEQ ID NO: 185155 - DNA, 17 bp, synthetic construct
  source 1..17: mol_type = other DNA
ctttctgccaatggacg

SEQ ID NO: 185156 - DNA, 17 bp, synthetic construct
  source 1..17: mol_type = other DNA
gctttctgccaatggac

SEQ ID NO: 185157 - DNA, 17 bp, synthetic construct
  source 1..17: mol_type = other DNA
ggctttctgccaatgga

SEQ ID NO: 185158 - DNA, 17 bp, synthetic construct
  source 1..17: mol_type = other DNA
aggctttctgccaatgg

SEQ ID NO: 185159 - DNA, 17 bp, synthetic construct
  source 1..17: mol_type = other DNA
caggctttctgccaatg

SEQ ID NO: 185160 - DNA, 17 bp, synthetic construct
  source 1..17: mol_type = other DNA
ccaggctttctgccaat

SEQ ID NO: 185161 - DNA, 17 bp, synthetic construct
  source 1..17: mol_type = other DNA
cccaggctttctgccaa

SEQ ID NO: 185162 - DNA, 17 bp, synthetic construct
  source 1..17: mol_type = other DNA
ccccaggctttctgcca

SEQ ID NO: 185163 - DNA, 17 bp, synthetic construct
  source 1..17: mol_type = other DNA
gccccaggctttctgcc

SEQ ID NO: 185164 - DNA, 17 bp, synthetic construct
  source 1..17: mol_type = other DNA
ggccccaggctttctgc

SEQ ID NO: 185165 - DNA, 17 bp, synthetic construct
  source 1..17: mol_type = other DNA
cggccccaggctttctg

SEQ ID NO: 185166 - DNA, 17 bp, synthetic construct
  source 1..17: mol_type = other DNA
gcggccccaggctttct

SEQ ID NO: 185167 - DNA, 17 bp, synthetic construct
  source 1..17: mol_type = other DNA
agcggccccaggctttc

SEQ ID NO: 185168 - DNA, 17 bp, synthetic construct
  source 1..17: mol_type = other DNA
gagcggccccaggcttt

SEQ ID NO: 185169 - DNA, 17 bp, synthetic construct
  source 1..17: mol_type = other DNA
agagcggccccaggctt

SEQ ID NO: 185170 - DNA, 17 bp, synthetic construct
  source 1..17: mol_type = other DNA
gagagcggccccaggct

SEQ ID NO: 185171 - DNA, 17 bp, synthetic construct
  source 1..17: mol_type = other DNA
ggagagcggccccaggc

SEQ ID NO: 185172 - DNA, 17 bp, synthetic construct
  source 1..17: mol_type = other DNA
aggagagcggccccagg

SEQ ID NO: 185173 - DNA, 17 bp, synthetic construct
  source 1..17: mol_type = other DNA
taggagagcggccccag

SEQ ID NO: 185174 - DNA, 17 bp, synthetic construct
  source 1..17: mol_type = other DNA
ctaggagagcggcccca

SEQ ID NO: 185175 - DNA, 17 bp, synthetic construct
  source 1..17: mol_type = other DNA
gctaggagagcggcccc

SEQ ID NO: 185176 - DNA, 17 bp, synthetic construct
  source 1..17: mol_type = other DNA
ggctaggagagcggccc

SEQ ID NO: 185177 - DNA, 17 bp, synthetic construct
  source 1..17: mol_type = other DNA
tggctaggagagcggcc

SEQ ID NO: 185178 - DNA, 17 bp, synthetic construct
  source 1..17: mol_type = other DNA
ctggctaggagagcggc

SEQ ID NO: 185179 - DNA, 17 bp, synthetic construct
  source 1..17: mol_type = other DNA
cctggctaggagagcgg

SEQ ID NO: 185180 - DNA, 17 bp, synthetic construct
  source 1..17: mol_type = other DNA
gcctggctaggagagcg

SEQ ID NO: 185181 - DNA, 17 bp, synthetic construct
  source 1..17: mol_type = other DNA
ggcctggctaggagagc

SEQ ID NO: 185182 - DNA, 17 bp, synthetic construct
  source 1..17: mol_type = other DNA
tggcctggctaggagag

SEQ ID NO: 185183 - DNA, 17 bp, synthetic construct
  source 1..17: mol_type = other DNA
ctggcctggctaggaga

SEQ ID NO: 185184 - DNA, 17 bp, synthetic construct
  source 1..17: mol_type = other DNA
cctggcctggctaggag

SEQ ID NO: 185185 - DNA, 17 bp, synthetic construct
  source 1..17: mol_type = other DNA
ccctggcctggctagga

SEQ ID NO: 185186 - DNA, 17 bp, synthetic construct
  source 1..17: mol_type = other DNA
gccctggcctggctagg

SEQ ID NO: 185187 - DNA, 17 bp, synthetic construct
  source 1..17: mol_type = other DNA
ggccctggcctggctag

SEQ ID NO: 185188 - DNA, 17 bp, synthetic construct
  source 1..17: mol_type = other DNA
gggccctggcctggcta

SEQ ID NO: 185189 - DNA, 17 bp, synthetic construct
  source 1..17: mol_type = other DNA
cgggccctggcctggct

SEQ ID NO: 185190 - DNA, 17 bp, synthetic construct
  source 1..17: mol_type = other DNA
ccgggccctggcctggc

SEQ ID NO: 185191 - DNA, 17 bp, synthetic construct
  source 1..17: mol_type = other DNA
gccgggccctggcctgg

SEQ ID NO: 185192 - DNA, 17 bp, synthetic construct
  source 1..17: mol_type = other DNA
agccgggccctggcctg

SEQ ID NO: 185193 - DNA, 17 bp, synthetic construct
  source 1..17: mol_type = other DNA
cagccgggccctggcct

SEQ ID NO: 185194 - DNA, 17 bp, synthetic construct
  source 1..17: mol_type = other DNA
tcagccgggccctggcc

SEQ ID NO: 185195 - DNA, 17 bp, synthetic construct
  source 1..17: mol_type = other DNA
ctcagccgggccctggc

SEQ ID NO: 185196 - DNA, 17 bp, synthetic construct
  source 1..17: mol_type = other DNA
gctcagccgggccctgg

SEQ ID NO: 185197 - DNA, 17 bp, synthetic construct
  source 1..17: mol_type = other DNA
ggctcagccgggccctg

SEQ ID NO: 185198 - DNA, 17 bp, synthetic construct
  source 1..17: mol_type = other DNA
cggctcagccgggccct

SEQ ID NO: 185199 - DNA, 17 bp, synthetic construct
  source 1..17: mol_type = other DNA
tcggctcagccgggccc

SEQ ID NO: 185200 - DNA, 17 bp, synthetic construct
  source 1..17: mol_type = other DNA
ctcggctcagccgggcc

SEQ ID NO: 185201 - DNA, 17 bp, synthetic construct
  source 1..17: mol_type = other DNA
gctcggctcagccgggc

SEQ ID NO: 185202 - DNA, 17 bp, synthetic construct
  source 1..17: mol_type = other DNA
ggctcggctcagccggg

SEQ ID NO: 185203 - DNA, 17 bp, synthetic construct
  source 1..17: mol_type = other DNA
tggctcggctcagccgg

SEQ ID NO: 185204 - DNA, 17 bp, synthetic construct
  source 1..17: mol_type = other DNA
gtggctcggctcagccg

SEQ ID NO: 185205 - DNA, 17 bp, synthetic construct
  source 1..17: mol_type = other DNA
tgtggctcggctcagcc

SEQ ID NO: 185206 - DNA, 17 bp, synthetic construct
  source 1..17: mol_type = other DNA
atgtggctcggctcagc

SEQ ID NO: 185207 - DNA, 17 bp, synthetic construct
  source 1..17: mol_type = other DNA
catgtggctcggctcag

SEQ ID NO: 185208 - DNA, 17 bp, synthetic construct
  source 1..17: mol_type = other DNA
ccatgtggctcggctca

SEQ ID NO: 185209 - DNA, 17 bp, synthetic construct
  source 1..17: mol_type = other DNA
gccatgtggctcggctc

SEQ ID NO: 185210 - DNA, 17 bp, synthetic construct
  source 1..17: mol_type = other DNA
tgccatgtggctcggct

SEQ ID NO: 185211 - DNA, 17 bp, synthetic construct
  source 1..17: mol_type = other DNA
gtgccatgtggctcggc

SEQ ID NO: 185212 - DNA, 17 bp, synthetic construct
  source 1..17: mol_type = other DNA
tgtgccatgtggctcgg

SEQ ID NO: 185213 - DNA, 17 bp, synthetic construct
  source 1..17: mol_type = other DNA
ctgtgccatgtggctcg

SEQ ID NO: 185214 - DNA, 17 bp, synthetic construct
  source 1..17: mol_type = other DNA
tctgtgccatgtggctc

SEQ ID NO: 185215 - DNA, 17 bp, synthetic construct
  source 1..17: mol_type = other DNA
ctctgtgccatgtggct

SEQ ID NO: 185216 - DNA, 17 bp, synthetic construct
  source 1..17: mol_type = other DNA
gctctgtgccatgtggc

SEQ ID NO: 185217 - DNA, 17 bp, synthetic construct
  source 1..17: mol_type = other DNA
agctctgtgccatgtgg

SEQ ID NO: 185218 - DNA, 17 bp, synthetic construct
  source 1..17: mol_type = other DNA
gagctctgtgccatgtg

SEQ ID NO: 185219 - DNA, 17 bp, synthetic construct
  source 1..17: mol_type = other DNA
ggagctctgtgccatgt

SEQ ID NO: 185220 - DNA, 17 bp, synthetic construct
  source 1..17: mol_type = other DNA
gggagctctgtgccatg

SEQ ID NO: 185221 - DNA, 17 bp, synthetic construct
  source 1..17: mol_type = other DNA
ggggagctctgtgccat

SEQ ID NO: 185222 - DNA, 17 bp, synthetic construct
  source 1..17: mol_type = other DNA
cggggagctctgtgcca

SEQ ID NO: 185223 - DNA, 17 bp, synthetic construct
  source 1..17: mol_type = other DNA
gcggggagctctgtgcc

SEQ ID NO: 185224 - DNA, 17 bp, synthetic construct
  source 1..17: mol_type = other DNA
agcggggagctctgtgc

SEQ ID NO: 185225 - DNA, 17 bp, synthetic construct
  source 1..17: mol_type = other DNA
cagcggggagctctgtg

SEQ ID NO: 185226 - DNA, 17 bp, synthetic construct
  source 1..17: mol_type = other DNA
gcagcggggagctctgt

SEQ ID NO: 185227 - DNA, 17 bp, synthetic construct
  source 1..17: mol_type = other DNA
cgcagcggggagctctg

SEQ ID NO: 185228 - DNA, 17 bp, synthetic construct
  source 1..17: mol_type = other DNA
tcgcagcggggagctct

SEQ ID NO: 185229 - DNA, 17 bp, synthetic construct
  source 1..17: mol_type = other DNA
ttcgcagcggggagctc

SEQ ID NO: 185230 - DNA, 17 bp, synthetic construct
  source 1..17: mol_type = other DNA
gttcgcagcggggagct

SEQ ID NO: 185231 - DNA, 17 bp, synthetic construct
  source 1..17: mol_type = other DNA
ggttcgcagcggggagc

SEQ ID NO: 185232 - DNA, 17 bp, synthetic construct
  source 1..17: mol_type = other DNA
gggttcgcagcggggag

SEQ ID NO: 185233 - DNA, 17 bp, synthetic construct
  source 1..17: mol_type = other DNA
tgggttcgcagcgggga

SEQ ID NO: 185234 - DNA, 17 bp, synthetic construct
  source 1..17: mol_type = other DNA
ctgggttcgcagcgggg

SEQ ID NO: 185235 - DNA, 17 bp, synthetic construct
  source 1..17: mol_type = other DNA
cctgggttcgcagcggg

SEQ ID NO: 185236 - DNA, 17 bp, synthetic construct
  source 1..17: mol_type = other DNA
acctgggttcgcagcgg

SEQ ID NO: 185237 - DNA, 17 bp, synthetic construct
  source 1..17: mol_type = other DNA
gacctgggttcgcagcg

SEQ ID NO: 185238 - DNA, 17 bp, synthetic construct
  source 1..17: mol_type = other DNA
ggacctgggttcgcagc

SEQ ID NO: 185239 - DNA, 17 bp, synthetic construct
  source 1..17: mol_type = other DNA
tggacctgggttcgcag

SEQ ID NO: 185240 - DNA, 17 bp, synthetic construct
  source 1..17: mol_type = other DNA
ctggacctgggttcgca

SEQ ID NO: 185241 - DNA, 17 bp, synthetic construct
  source 1..17: mol_type = other DNA
cctggacctgggttcgc

SEQ ID NO: 185242 - DNA, 17 bp, synthetic construct
  source 1..17: mol_type = other DNA
acctggacctgggttcg

SEQ ID NO: 185243 - DNA, 17 bp, synthetic construct
  source 1..17: mol_type = other DNA
cacctggacctgggttc

SEQ ID NO: 185244 - DNA, 17 bp, synthetic construct
  source 1..17: mol_type = other DNA
acacctggacctgggtt

SEQ ID NO: 185245 - DNA, 17 bp, synthetic construct
  source 1..17: mol_type = other DNA
gacacctggacctgggt

SEQ ID NO: 185246 - DNA, 17 bp, synthetic construct
  source 1..17: mol_type = other DNA
ggacacctggacctggg

SEQ ID NO: 185247 - DNA, 17 bp, synthetic construct
  source 1..17: mol_type = other DNA
gggacacctggacctgg

SEQ ID NO: 185248 - DNA, 17 bp, synthetic construct
  source 1..17: mol_type = other DNA
ggggacacctggacctg

SEQ ID NO: 185249 - DNA, 17 bp, synthetic construct
  source 1..17: mol_type = other DNA
gggggacacctggacct

SEQ ID NO: 185250 - DNA, 17 bp, synthetic construct
  source 1..17: mol_type = other DNA
agggggacacctggacc

SEQ ID NO: 185251 - DNA, 17 bp, synthetic construct
  source 1..17: mol_type = other DNA
cagggggacacctggac

SEQ ID NO: 185252 - DNA, 17 bp, synthetic construct
  source 1..17: mol_type = other DNA
ccagggggacacctgga

SEQ ID NO: 185253 - DNA, 17 bp, synthetic construct
  source 1..17: mol_type = other DNA
cccagggggacacctgg

SEQ ID NO: 185254 - DNA, 17 bp, synthetic construct
  source 1..17: mol_type = other DNA
ccccagggggacacctg

SEQ ID NO: 185255 - DNA, 17 bp, synthetic construct
  source 1..17: mol_type = other DNA
tccccagggggacacct

SEQ ID NO: 185256 - DNA, 17 bp, synthetic construct
  source 1..17: mol_type = other DNA
ctccccagggggacacc

SEQ ID NO: 185257 - DNA, 17 bp, synthetic construct
  source 1..17: mol_type = other DNA
cctccccagggggacac

SEQ ID NO: 185258 - DNA, 17 bp, synthetic construct
  source 1..17: mol_type = other DNA
ccctccccagggggaca

SEQ ID NO: 185259 - DNA, 17 bp, synthetic construct
  source 1..17: mol_type = other DNA
accctccccagggggac

SEQ ID NO: 185260 - DNA, 17 bp, synthetic construct
  source 1..17: mol_type = other DNA
caccctccccaggggga

SEQ ID NO: 185261 - DNA, 17 bp, synthetic construct
  source 1..17: mol_type = other DNA
ccaccctccccaggggg

SEQ ID NO: 185262 - DNA, 17 bp, synthetic construct
  source 1..17: mol_type = other DNA
cccaccctccccagggg

SEQ ID NO: 185263 - DNA, 17 bp, synthetic construct
  source 1..17: mol_type = other DNA
acccaccctccccaggg

SEQ ID NO: 185264 - DNA, 17 bp, synthetic construct
  source 1..17: mol_type = other DNA
cacccaccctccccagg

SEQ ID NO: 185265 - DNA, 17 bp, synthetic construct
  source 1..17: mol_type = other DNA
ccacccaccctccccag

SEQ ID NO: 185266 - DNA, 17 bp, synthetic construct
  source 1..17: mol_type = other DNA
tccacccaccctcccca

SEQ ID NO: 185267 - DNA, 17 bp, synthetic construct
  source 1..17: mol_type = other DNA
ttccacccaccctcccc

SEQ ID NO: 185268 - DNA, 17 bp, synthetic construct
  source 1..17: mol_type = other DNA
gttccacccaccctccc

SEQ ID NO: 185269 - DNA, 17 bp, synthetic construct
  source 1..17: mol_type = other DNA
ggttccacccaccctcc

SEQ ID NO: 185270 - DNA, 17 bp, synthetic construct
  source 1..17: mol_type = other DNA
tggttccacccaccctc

SEQ ID NO: 185271 - DNA, 17 bp, synthetic construct
  source 1..17: mol_type = other DNA
ctggttccacccaccct

SEQ ID NO: 185272 - DNA, 17 bp, synthetic construct
  source 1..17: mol_type = other DNA
tctggttccacccaccc

SEQ ID NO: 185273 - DNA, 17 bp, synthetic construct
  source 1..17: mol_type = other DNA
ctctggttccacccacc

SEQ ID NO: 185274 - DNA, 17 bp, synthetic construct
  source 1..17: mol_type = other DNA
gctctggttccacccac

SEQ ID NO: 185275 - DNA, 17 bp, synthetic construct
  source 1..17: mol_type = other DNA
ggctctggttccaccca

SEQ ID NO: 185276 - DNA, 17 bp, synthetic construct
  source 1..17: mol_type = other DNA
aggctctggttccaccc

SEQ ID NO: 185277 - DNA, 17 bp, synthetic construct
  source 1..17: mol_type = other DNA
aaggctctggttccacc

SEQ ID NO: 185278 - DNA, 17 bp, synthetic construct
  source 1..17: mol_type = other DNA
gaaggctctggttccac

SEQ ID NO: 185279 - DNA, 17 bp, synthetic construct
  source 1..17: mol_type = other DNA
agaaggctctggttcca

SEQ ID NO: 185280 - DNA, 17 bp, synthetic construct
  source 1..17: mol_type = other DNA
cagaaggctctggttcc

SEQ ID NO: 185281 - DNA, 17 bp, synthetic construct
  source 1..17: mol_type = other DNA
acagaaggctctggttc

SEQ ID NO: 185282 - DNA, 17 bp, synthetic construct
  source 1..17: mol_type = other DNA
cacagaaggctctggtt

SEQ ID NO: 185283 - DNA, 17 bp, synthetic construct
  source 1..17: mol_type = other DNA
tcacagaaggctctggt

SEQ ID NO: 185284 - DNA, 17 bp, synthetic construct
  source 1..17: mol_type = other DNA
ttcacagaaggctctgg

SEQ ID NO: 185285 - DNA, 17 bp, synthetic construct
  source 1..17: mol_type = other DNA
cttcacagaaggctctg

SEQ ID NO: 185286 - DNA, 17 bp, synthetic construct
  source 1..17: mol_type = other DNA
gcttcacagaaggctct

SEQ ID NO: 185287 - DNA, 17 bp, synthetic construct
  source 1..17: mol_type = other DNA
ggcttcacagaaggctc

SEQ ID NO: 185288 - DNA, 17 bp, synthetic construct
  source 1..17: mol_type = other DNA
gggcttcacagaaggct

SEQ ID NO: 185289 - DNA, 17 bp, synthetic construct
  source 1..17: mol_type = other DNA
ggggcttcacagaaggc

SEQ ID NO: 185290 - DNA, 17 bp, synthetic construct
  source 1..17: mol_type = other DNA
gggggcttcacagaagg

SEQ ID NO: 185291 - DNA, 17 bp, synthetic construct
  source 1..17: mol_type = other DNA
ggggggcttcacagaag

SEQ ID NO: 185292 - DNA, 17 bp, synthetic construct
  source 1..17: mol_type = other DNA
tggggggcttcacagaa

SEQ ID NO: 185293 - DNA, 17 bp, synthetic construct
  source 1..17: mol_type = other DNA
atggggggcttcacaga

SEQ ID NO: 185294 - DNA, 17 bp, synthetic construct
  source 1..17: mol_type = other DNA
catggggggcttcacag

SEQ ID NO: 185295 - DNA, 17 bp, synthetic construct
  source 1..17: mol_type = other DNA
ccatggggggcttcaca

SEQ ID NO: 185296 - DNA, 17 bp, synthetic construct
  source 1..17: mol_type = other DNA
gccatggggggcttcac

SEQ ID NO: 185297 - DNA, 17 bp, synthetic construct
  source 1..17: mol_type = other DNA
agccatggggggcttca

SEQ ID NO: 185298 - DNA, 17 bp, synthetic construct
  source 1..17: mol_type = other DNA
aagccatggggggcttc

SEQ ID NO: 185299 - DNA, 17 bp, synthetic construct
  source 1..17: mol_type = other DNA
caagccatggggggctt

SEQ ID NO: 185300 - DNA, 17 bp, synthetic construct
  source 1..17: mol_type = other DNA
gcaagccatggggggct

SEQ ID NO: 185301 - DNA, 17 bp, synthetic construct
  source 1..17: mol_type = other DNA
ggcaagccatggggggc

SEQ ID NO: 185302 - DNA, 17 bp, synthetic construct
  source 1..17: mol_type = other DNA
tggcaagccatgggggg

SEQ ID NO: 185303 - DNA, 17 bp, synthetic construct
  source 1..17: mol_type = other DNA
gtggcaagccatggggg

SEQ ID NO: 185304 - DNA, 17 bp, synthetic construct
  source 1..17: mol_type = other DNA
agtggcaagccatgggg

SEQ ID NO: 185305 - DNA, 17 bp, synthetic construct
  source 1..17: mol_type = other DNA
cagtggcaagccatggg

SEQ ID NO: 185306 - DNA, 17 bp, synthetic construct
  source 1..17: mol_type = other DNA
acagtggcaagccatgg

SEQ ID NO: 185307 - DNA, 17 bp, synthetic construct
  source 1..17: mol_type = other DNA
cacagtggcaagccatg

SEQ ID NO: 185308 - DNA, 17 bp, synthetic construct
  source 1..17: mol_type = other DNA
ccacagtggcaagccat

SEQ ID NO: 185309 - DNA, 17 bp, synthetic construct
  source 1..17: mol_type = other DNA
accacagtggcaagcca

SEQ ID NO: 185310 - DNA, 17 bp, synthetic construct
  source 1..17: mol_type = other DNA
aaccacagtggcaagcc

SEQ ID NO: 185311 - DNA, 17 bp, synthetic construct
  source 1..17: mol_type = other DNA
caaccacagtggcaagc

SEQ ID NO: 185312 - DNA, 17 bp, synthetic construct
  source 1..17: mol_type = other DNA
ccaaccacagtggcaag

SEQ ID NO: 185313 - DNA, 17 bp, synthetic construct
  source 1..17: mol_type = other DNA
gccaaccacagtggcaa

SEQ ID NO: 185314 - DNA, 17 bp, synthetic construct
  source 1..17: mol_type = other DNA
agccaaccacagtggca

SEQ ID NO: 185315 - DNA, 17 bp, synthetic construct
  source 1..17: mol_type = other DNA
cagccaaccacagtggc

SEQ ID NO: 185316 - DNA, 17 bp, synthetic construct
  source 1..17: mol_type = other DNA
acagccaaccacagtgg

SEQ ID NO: 185317 - DNA, 17 bp, synthetic construct
  source 1..17: mol_type = other DNA
gacagccaaccacagtg

SEQ ID NO: 185318 - DNA, 17 bp, synthetic construct
  source 1..17: mol_type = other DNA
tgacagccaaccacagt

SEQ ID NO: 185319 - DNA, 17 bp, synthetic construct
  source 1..17: mol_type = other DNA
ctgacagccaaccacag

SEQ ID NO: 185320 - DNA, 17 bp, synthetic construct
  source 1..17: mol_type = other DNA
gctgacagccaaccaca

SEQ ID NO: 185321 - DNA, 17 bp, synthetic construct
  source 1..17: mol_type = other DNA
tgctgacagccaaccac

SEQ ID NO: 185322 - DNA, 17 bp, synthetic construct
  source 1..17: mol_type = other DNA
ctgctgacagccaacca

SEQ ID NO: 185323 - DNA, 17 bp, synthetic construct
  source 1..17: mol_type = other DNA
cctgctgacagccaacc

SEQ ID NO: 185324 - DNA, 17 bp, synthetic construct
  source 1..17: mol_type = other DNA
tcctgctgacagccaac

SEQ ID NO: 185325 - DNA, 17 bp, synthetic construct
  source 1..17: mol_type = other DNA
ctcctgctgacagccaa

SEQ ID NO: 185326 - DNA, 17 bp, synthetic construct
  source 1..17: mol_type = other DNA
cctcctgctgacagcca

SEQ ID NO: 185327 - DNA, 17 bp, synthetic construct
  source 1..17: mol_type = other DNA
ccctcctgctgacagcc

SEQ ID NO: 185328 - DNA, 17 bp, synthetic construct
  source 1..17: mol_type = other DNA
cccctcctgctgacagc

SEQ ID NO: 185329 - DNA, 17 bp, synthetic construct
  source 1..17: mol_type = other DNA
gcccctcctgctgacag

SEQ ID NO: 185330 - DNA, 17 bp, synthetic construct
  source 1..17: mol_type = other DNA
ggcccctcctgctgaca

SEQ ID NO: 185331 - DNA, 17 bp, synthetic construct
  source 1..17: mol_type = other DNA
tggcccctcctgctgac

SEQ ID NO: 185332 - DNA, 17 bp, synthetic construct
  source 1..17: mol_type = other DNA
ctggcccctcctgctga

SEQ ID NO: 185333 - DNA, 17 bp, synthetic construct
  source 1..17: mol_type = other DNA
tctggcccctcctgctg

SEQ ID NO: 185334 - DNA, 17 bp, synthetic construct
  source 1..17: mol_type = other DNA
ttctggcccctcctgct

SEQ ID NO: 185335 - DNA, 17 bp, synthetic construct
  source 1..17: mol_type = other DNA
cttctggcccctcctgc

SEQ ID NO: 185336 - DNA, 17 bp, synthetic construct
  source 1..17: mol_type = other DNA
ccttctggcccctcctg

SEQ ID NO: 185337 - DNA, 17 bp, synthetic construct
  source 1..17: mol_type = other DNA
cccttctggcccctcct

SEQ ID NO: 185338 - DNA, 17 bp, synthetic construct
  source 1..17: mol_type = other DNA
acccttctggcccctcc

SEQ ID NO: 185339 - DNA, 17 bp, synthetic construct
  source 1..17: mol_type = other DNA
aacccttctggcccctc

SEQ ID NO: 185340 - DNA, 17 bp, synthetic construct
  source 1..17: mol_type = other DNA
caacccttctggcccct

SEQ ID NO: 185341 - DNA, 17 bp, synthetic construct
  source 1..17: mol_type = other DNA
tcaacccttctggcccc

SEQ ID NO: 185342 - DNA, 17 bp, synthetic construct
  source 1..17: mol_type = other DNA
gtcaacccttctggccc

SEQ ID NO: 185343 - DNA, 17 bp, synthetic construct
  source 1..17: mol_type = other DNA
ggtcaacccttctggcc

SEQ ID NO: 185344 - DNA, 17 bp, synthetic construct
  source 1..17: mol_type = other DNA
gggtcaacccttctggc

SEQ ID NO: 185345 - DNA, 17 bp, synthetic construct
  source 1..17: mol_type = other DNA
agggtcaacccttctgg

SEQ ID NO: 185346 - DNA, 17 bp, synthetic construct
  source 1..17: mol_type = other DNA
aagggtcaacccttctg

SEQ ID NO: 185347 - DNA, 17 bp, synthetic construct
  source 1..17: mol_type = other DNA
taagggtcaacccttct

SEQ ID NO: 185348 - DNA, 17 bp, synthetic construct
  source 1..17: mol_type = other DNA
ctaagggtcaacccttc

SEQ ID NO: 185349 - DNA, 17 bp, synthetic construct
  source 1..17: mol_type = other DNA
gctaagggtcaaccctt

SEQ ID NO: 185350 - DNA, 17 bp, synthetic construct
  source 1..17: mol_type = other DNA
agctaagggtcaaccct

SEQ ID NO: 185351 - DNA, 17 bp, synthetic construct
  source 1..17: mol_type = other DNA
tagctaagggtcaaccc

SEQ ID NO: 185352 - DNA, 17 bp, synthetic construct
  source 1..17: mol_type = other DNA
ctagctaagggtcaacc

SEQ ID NO: 185353 - DNA, 17 bp, synthetic construct
  source 1..17: mol_type = other DNA
tctagctaagggtcaac

SEQ ID NO: 185354 - DNA, 17 bp, synthetic construct
  source 1..17: mol_type = other DNA
ttctagctaagggtcaa

SEQ ID NO: 185355 - DNA, 17 bp, synthetic construct
  source 1..17: mol_type = other DNA
cttctagctaagggtca

SEQ ID NO: 185356 - DNA, 17 bp, synthetic construct
  source 1..17: mol_type = other DNA
tcttctagctaagggtc

SEQ ID NO: 185357 - DNA, 17 bp, synthetic construct
  source 1..17: mol_type = other DNA
ctcttctagctaagggt

SEQ ID NO: 185358 - DNA, 17 bp, synthetic construct
  source 1..17: mol_type = other DNA
cctcttctagctaaggg

SEQ ID NO: 185359 - DNA, 17 bp, synthetic construct
  source 1..17: mol_type = other DNA
gcctcttctagctaagg

SEQ ID NO: 185360 - DNA, 17 bp, synthetic construct
  source 1..17: mol_type = other DNA
tgcctcttctagctaag

SEQ ID NO: 185361 - DNA, 17 bp, synthetic construct
  source 1..17: mol_type = other DNA
ctgcctcttctagctaa

SEQ ID NO: 185362 - DNA, 17 bp, synthetic construct
  source 1..17: mol_type = other DNA
cctgcctcttctagcta

SEQ ID NO: 185363 - DNA, 17 bp, synthetic construct
  source 1..17: mol_type = other DNA
tcctgcctcttctagct

SEQ ID NO: 185364 - DNA, 17 bp, synthetic construct
  source 1..17: mol_type = other DNA
ctcctgcctcttctagc

SEQ ID NO: 185365 - DNA, 17 bp, synthetic construct
  source 1..17: mol_type = other DNA
cctcctgcctcttctag

SEQ ID NO: 185366 - DNA, 17 bp, synthetic construct
  source 1..17: mol_type = other DNA
tcctcctgcctcttcta

SEQ ID NO: 185367 - DNA, 17 bp, synthetic construct
  source 1..17: mol_type = other DNA
ttcctcctgcctcttct

SEQ ID NO: 185368 - DNA, 17 bp, synthetic construct
  source 1..17: mol_type = other DNA
cttcctcctgcctcttc

SEQ ID NO: 185369 - DNA, 17 bp, synthetic construct
  source 1..17: mol_type = other DNA
ccttcctcctgcctctt

SEQ ID NO: 185370 - DNA, 17 bp, synthetic construct
  source 1..17: mol_type = other DNA
cccttcctcctgcctct

SEQ ID NO: 185371 - DNA, 17 bp, synthetic construct
  source 1..17: mol_type = other DNA
acccttcctcctgcctc

SEQ ID NO: 185372 - DNA, 17 bp, synthetic construct
  source 1..17: mol_type = other DNA
gacccttcctcctgcct

SEQ ID NO: 185373 - DNA, 17 bp, synthetic construct
  source 1..17: mol_type = other DNA
tgacccttcctcctgcc

SEQ ID NO: 185374 - DNA, 17 bp, synthetic construct
  source 1..17: mol_type = other DNA
ttgacccttcctcctgc

SEQ ID NO: 185375 - DNA, 17 bp, synthetic construct
  source 1..17: mol_type = other DNA
cttgacccttcctcctg

SEQ ID NO: 185376 - DNA, 17 bp, synthetic construct
  source 1..17: mol_type = other DNA
ccttgacccttcctcct

SEQ ID NO: 185377 - DNA, 17 bp, synthetic construct
  source 1..17: mol_type = other DNA
cccttgacccttcctcc

SEQ ID NO: 185378 - DNA, 17 bp, synthetic construct
  source 1..17: mol_type = other DNA
gcccttgacccttcctc

SEQ ID NO: 185379 - DNA, 17 bp, synthetic construct
  source 1..17: mol_type = other DNA
agcccttgacccttcct

SEQ ID NO: 185380 - DNA, 17 bp, synthetic construct
  source 1..17: mol_type = other DNA
cagcccttgacccttcc

SEQ ID NO: 185381 - DNA, 17 bp, synthetic construct
  source 1..17: mol_type = other DNA
gcagcccttgacccttc

SEQ ID NO: 185382 - DNA, 17 bp, synthetic construct
  source 1..17: mol_type = other DNA
agcagcccttgaccctt

SEQ ID NO: 185383 - DNA, 17 bp, synthetic construct
  source 1..17: mol_type = other DNA
aagcagcccttgaccct

SEQ ID NO: 185384 - DNA, 17 bp, synthetic construct
  source 1..17: mol_type = other DNA
taagcagcccttgaccc

SEQ ID NO: 185385 - DNA, 17 bp, synthetic construct
  source 1..17: mol_type = other DNA
ctaagcagcccttgacc

SEQ ID NO: 185386 - DNA, 17 bp, synthetic construct
  source 1..17: mol_type = other DNA
cctaagcagcccttgac

SEQ ID NO: 185387 - DNA, 17 bp, synthetic construct
  source 1..17: mol_type = other DNA
ccctaagcagcccttga

SEQ ID NO: 185388 - DNA, 17 bp, synthetic construct
  source 1..17: mol_type = other DNA
accctaagcagcccttg

SEQ ID NO: 185389 - DNA, 17 bp, synthetic construct
  source 1..17: mol_type = other DNA
gaccctaagcagccctt

SEQ ID NO: 185390 - DNA, 17 bp, synthetic construct
  source 1..17: mol_type = other DNA
tgaccctaagcagccct

SEQ ID NO: 185391 - DNA, 17 bp, synthetic construct
  source 1..17: mol_type = other DNA
ctgaccctaagcagccc

SEQ ID NO: 185392 - DNA, 17 bp, synthetic construct
  source 1..17: mol_type = other DNA
gctgaccctaagcagcc

SEQ ID NO: 185393 - DNA, 17 bp, synthetic construct
  source 1..17: mol_type = other DNA
tgctgaccctaagcagc

SEQ ID NO: 185394 - DNA, 17 bp, synthetic construct
  source 1..17: mol_type = other DNA
ctgctgaccctaagcag

SEQ ID NO: 185395 - DNA, 17 bp, synthetic construct
  source 1..17: mol_type = other DNA
cctgctgaccctaagca

SEQ ID NO: 185396 - DNA, 17 bp, synthetic construct
  source 1..17: mol_type = other DNA
tcctgctgaccctaagc

SEQ ID NO: 185397 - DNA, 17 bp, synthetic construct
  source 1..17: mol_type = other DNA
atcctgctgaccctaag

SEQ ID NO: 185398 - DNA, 17 bp, synthetic construct
  source 1..17: mol_type = other DNA
aatcctgctgaccctaa

SEQ ID NO: 185399 - DNA, 17 bp, synthetic construct
  source 1..17: mol_type = other DNA
caatcctgctgacccta

SEQ ID NO: 185400 - DNA, 17 bp, synthetic construct
  source 1..17: mol_type = other DNA
ccaatcctgctgaccct

SEQ ID NO: 185401 - DNA, 17 bp, synthetic construct
  source 1..17: mol_type = other DNA
tccaatcctgctgaccc

SEQ ID NO: 185402 - DNA, 17 bp, synthetic construct
  source 1..17: mol_type = other DNA
ctccaatcctgctgacc

SEQ ID NO: 185403 - DNA, 17 bp, synthetic construct
  source 1..17: mol_type = other DNA
cctccaatcctgctgac

SEQ ID NO: 185404 - DNA, 17 bp, synthetic construct
  source 1..17: mol_type = other DNA
tcctccaatcctgctga

SEQ ID NO: 185405 - DNA, 17 bp, synthetic construct
  source 1..17: mol_type = other DNA
ctcctccaatcctgctg

SEQ ID NO: 185406 - DNA, 17 bp, synthetic construct
  source 1..17: mol_type = other DNA
gctcctccaatcctgct

SEQ ID NO: 185407 - DNA, 17 bp, synthetic construct
  source 1..17: mol_type = other DNA
agctcctccaatcctgc

SEQ ID NO: 185408 - DNA, 17 bp, synthetic construct
  source 1..17: mol_type = other DNA
cagctcctccaatcctg

SEQ ID NO: 185409 - DNA, 17 bp, synthetic construct
  source 1..17: mol_type = other DNA
ccagctcctccaatcct

SEQ ID NO: 185410 - DNA, 17 bp, synthetic construct
  source 1..17: mol_type = other DNA
accagctcctccaatcc

SEQ ID NO: 185411 - DNA, 17 bp, synthetic construct
  source 1..17: mol_type = other DNA
aaccagctcctccaatc

SEQ ID NO: 185412 - DNA, 17 bp, synthetic construct
  source 1..17: mol_type = other DNA
gaaccagctcctccaat

SEQ ID NO: 185413 - DNA, 17 bp, synthetic construct
  source 1..17: mol_type = other DNA
tgaaccagctcctccaa

SEQ ID NO: 185414 - DNA, 17 bp, synthetic construct
  source 1..17: mol_type = other DNA
ctgaaccagctcctcca

SEQ ID NO: 185415 - DNA, 17 bp, synthetic construct
  source 1..17: mol_type = other DNA
tctgaaccagctcctcc

SEQ ID NO: 185416 - DNA, 17 bp, synthetic construct
  source 1..17: mol_type = other DNA
gtctgaaccagctcctc

SEQ ID NO: 185417 - DNA, 17 bp, synthetic construct
  source 1..17: mol_type = other DNA
tgtctgaaccagctcct

SEQ ID NO: 185418 - DNA, 17 bp, synthetic construct
  source 1..17: mol_type = other DNA
ctgtctgaaccagctcc

SEQ ID NO: 185419 - DNA, 17 bp, synthetic construct
  source 1..17: mol_type = other DNA
cctgtctgaaccagctc

SEQ ID NO: 185420 - DNA, 17 bp, synthetic construct
  source 1..17: mol_type = other DNA
ccctgtctgaaccagct

SEQ ID NO: 185421 - DNA, 17 bp, synthetic construct
  source 1..17: mol_type = other DNA
cccctgtctgaaccagc

SEQ ID NO: 185422 - DNA, 17 bp, synthetic construct
  source 1..17: mol_type = other DNA
tcccctgtctgaaccag

SEQ ID NO: 185423 - DNA, 17 bp, synthetic construct
  source 1..17: mol_type = other DNA
ttcccctgtctgaacca

SEQ ID NO: 185424 - DNA, 17 bp, synthetic construct
  source 1..17: mol_type = other DNA
cttcccctgtctgaacc

SEQ ID NO: 185425 - DNA, 17 bp, synthetic construct
  source 1..17: mol_type = other DNA
acttcccctgtctgaac

SEQ ID NO: 185426 - DNA, 17 bp, synthetic construct
  source 1..17: mol_type = other DNA
cacttcccctgtctgaa

SEQ ID NO: 185427 - DNA, 17 bp, synthetic construct
  source 1..17: mol_type = other DNA
gcacttcccctgtctga

SEQ ID NO: 185428 - DNA, 17 bp, synthetic construct
  source 1..17: mol_type = other DNA
tgcacttcccctgtctg

SEQ ID NO: 185429 - DNA, 17 bp, synthetic construct
  source 1..17: mol_type = other DNA
ctgcacttcccctgtct

SEQ ID NO: 185430 - DNA, 17 bp, synthetic construct
  source 1..17: mol_type = other DNA
cctgcacttcccctgtc

SEQ ID NO: 185431 - DNA, 17 bp, synthetic construct
  source 1..17: mol_type = other DNA
gcctgcacttcccctgt

SEQ ID NO: 185432 - DNA, 17 bp, synthetic construct
  source 1..17: mol_type = other DNA
ggcctgcacttcccctg

SEQ ID NO: 185433 - DNA, 17 bp, synthetic construct
  source 1..17: mol_type = other DNA
tggcctgcacttcccct

SEQ ID NO: 185434 - DNA, 17 bp, synthetic construct
  source 1..17: mol_type = other DNA
gtggcctgcacttcccc

SEQ ID NO: 185435 - DNA, 17 bp, synthetic construct
  source 1..17: mol_type = other DNA
tgtggcctgcacttccc

SEQ ID NO: 185436 - DNA, 17 bp, synthetic construct
  source 1..17: mol_type = other DNA
ctgtggcctgcacttcc

SEQ ID NO: 185437 - DNA, 17 bp, synthetic construct
  source 1..17: mol_type = other DNA
tctgtggcctgcacttc

SEQ ID NO: 185438 - DNA, 17 bp, synthetic construct
  source 1..17: mol_type = other DNA
ttctgtggcctgcactt

SEQ ID NO: 185439 - DNA, 17 bp, synthetic construct
  source 1..17: mol_type = other DNA
cttctgtggcctgcact

SEQ ID NO: 185440 - DNA, 17 bp, synthetic construct
  source 1..17: mol_type = other DNA
tcttctgtggcctgcac

SEQ ID NO: 185441 - DNA, 17 bp, synthetic construct
  source 1..17: mol_type = other DNA
gtcttctgtggcctgca

SEQ ID NO: 185442 - DNA, 17 bp, synthetic construct
  source 1..17: mol_type = other DNA
tgtcttctgtggcctgc

SEQ ID NO: 185443 - DNA, 17 bp, synthetic construct
  source 1..17: mol_type = other DNA
ctgtcttctgtggcctg

SEQ ID NO: 185444 - DNA, 17 bp, synthetic construct
  source 1..17: mol_type = other DNA
tctgtcttctgtggcct

SEQ ID NO: 185445 - DNA, 17 bp, synthetic construct
  source 1..17: mol_type = other DNA
ctctgtcttctgtggcc

SEQ ID NO: 185446 - DNA, 17 bp, synthetic construct
  source 1..17: mol_type = other DNA
gctctgtcttctgtggc

SEQ ID NO: 185447 - DNA, 17 bp, synthetic construct
  source 1..17: mol_type = other DNA
ggctctgtcttctgtgg

SEQ ID NO: 185448 - DNA, 17 bp, synthetic construct
  source 1..17: mol_type = other DNA
cggctctgtcttctgtg

SEQ ID NO: 185449 - DNA, 17 bp, synthetic construct
  source 1..17: mol_type = other DNA
ccggctctgtcttctgt

SEQ ID NO: 185450 - DNA, 17 bp, synthetic construct
  source 1..17: mol_type = other DNA
cccggctctgtcttctg

SEQ ID NO: 185451 - DNA, 17 bp, synthetic construct
  source 1..17: mol_type = other DNA
tcccggctctgtcttct

SEQ ID NO: 185452 - DNA, 17 bp, synthetic construct
  source 1..17: mol_type = other DNA
ctcccggctctgtcttc

SEQ ID NO: 185453 - DNA, 17 bp, synthetic construct
  source 1..17: mol_type = other DNA
gctcccggctctgtctt

SEQ ID NO: 185454 - DNA, 17 bp, synthetic construct
  source 1..17: mol_type = other DNA
ggctcccggctctgtct

SEQ ID NO: 185455 - DNA, 17 bp, synthetic construct
  source 1..17: mol_type = other DNA
tggctcccggctctgtc

SEQ ID NO: 185456 - DNA, 17 bp, synthetic construct
  source 1..17: mol_type = other DNA
ttggctcccggctctgt

SEQ ID NO: 185457 - DNA, 17 bp, synthetic construct
  source 1..17: mol_type = other DNA
cttggctcccggctctg

SEQ ID NO: 185458 - DNA, 17 bp, synthetic construct
  source 1..17: mol_type = other DNA
ccttggctcccggctct

SEQ ID NO: 185459 - DNA, 17 bp, synthetic construct
  source 1..17: mol_type = other DNA
cccttggctcccggctc

SEQ ID NO: 185460 - DNA, 17 bp, synthetic construct
  source 1..17: mol_type = other DNA
tcccttggctcccggct

SEQ ID NO: 185461 - DNA, 17 bp, synthetic construct
  source 1..17: mol_type = other DNA
gtcccttggctcccggc

SEQ ID NO: 185462 - DNA, 17 bp, synthetic construct
  source 1..17: mol_type = other DNA
ggtcccttggctcccgg

SEQ ID NO: 185463 - DNA, 17 bp, synthetic construct
  source 1..17: mol_type = other DNA
gggtcccttggctcccg

SEQ ID NO: 185464 - DNA, 17 bp, synthetic construct
  source 1..17: mol_type = other DNA
agggtcccttggctccc

SEQ ID NO: 185465 - DNA, 17 bp, synthetic construct
  source 1..17: mol_type = other DNA
cagggtcccttggctcc

SEQ ID NO: 185466 - DNA, 17 bp, synthetic construct
  source 1..17: mol_type = other DNA
ccagggtcccttggctc

SEQ ID NO: 185467 - DNA, 17 bp, synthetic construct
  source 1..17: mol_type = other DNA
cccagggtcccttggct

SEQ ID NO: 185468 - DNA, 17 bp, synthetic construct
  source 1..17: mol_type = other DNA
ccccagggtcccttggc

SEQ ID NO: 185469 - DNA, 17 bp, synthetic construct
  source 1..17: mol_type = other DNA
cccccagggtcccttgg

SEQ ID NO: 185470 - DNA, 17 bp, synthetic construct
  source 1..17: mol_type = other DNA
gcccccagggtcccttg

SEQ ID NO: 185471 - DNA, 17 bp, synthetic construct
  source 1..17: mol_type = other DNA
ggcccccagggtccctt

SEQ ID NO: 185472 - DNA, 17 bp, synthetic construct
  source 1..17: mol_type = other DNA
gggcccccagggtccct

SEQ ID NO: 185473 - DNA, 17 bp, synthetic construct
  source 1..17: mol_type = other DNA
tgggcccccagggtccc

SEQ ID NO: 185474 - DNA, 17 bp, synthetic construct
  source 1..17: mol_type = other DNA
ctgggcccccagggtcc

SEQ ID NO: 185475 - DNA, 17 bp, synthetic construct
  source 1..17: mol_type = other DNA
tctgggcccccagggtc

SEQ ID NO: 185476 - DNA, 17 bp, synthetic construct
  source 1..17: mol_type = other DNA
ctctgggcccccagggt

SEQ ID NO: 185477 - DNA, 17 bp, synthetic construct
  source 1..17: mol_type = other DNA
gctctgggcccccaggg

SEQ ID NO: 185478 - DNA, 17 bp, synthetic construct
  source 1..17: mol_type = other DNA
agctctgggcccccagg

SEQ ID NO: 185479 - DNA, 17 bp, synthetic construct
  source 1..17: mol_type = other DNA
cagctctgggcccccag

SEQ ID NO: 185480 - DNA, 17 bp, synthetic construct
  source 1..17: mol_type = other DNA
gcagctctgggccccca

SEQ ID NO: 185481 - DNA, 17 bp, synthetic construct
  source 1..17: mol_type = other DNA
ggcagctctgggccccc

SEQ ID NO: 185482 - DNA, 17 bp, synthetic construct
  source 1..17: mol_type = other DNA
gggcagctctgggcccc

SEQ ID NO: 185483 - DNA, 17 bp, synthetic construct
  source 1..17: mol_type = other DNA
ggggcagctctgggccc

SEQ ID NO: 185484 - DNA, 17 bp, synthetic construct
  source 1..17: mol_type = other DNA
tggggcagctctgggcc

SEQ ID NO: 185485 - DNA, 17 bp, synthetic construct
  source 1..17: mol_type = other DNA
atggggcagctctgggc

SEQ ID NO: 185486 - DNA, 17 bp, synthetic construct
  source 1..17: mol_type = other DNA
gatggggcagctctggg

SEQ ID NO: 185487 - DNA, 17 bp, synthetic construct
  source 1..17: mol_type = other DNA
ggatggggcagctctgg

SEQ ID NO: 185488 - DNA, 17 bp, synthetic construct
  source 1..17: mol_type = other DNA
aggatggggcagctctg

SEQ ID NO: 185489 - DNA, 17 bp, synthetic construct
  source 1..17: mol_type = other DNA
caggatggggcagctct

SEQ ID NO: 185490 - DNA, 17 bp, synthetic construct
  source 1..17: mol_type = other DNA
tcaggatggggcagctc

SEQ ID NO: 185491 - DNA, 17 bp, synthetic construct
  source 1..17: mol_type = other DNA
ctcaggatggggcagct

SEQ ID NO: 185492 - DNA, 17 bp, synthetic construct
  source 1..17: mol_type = other DNA
tctcaggatggggcagc

SEQ ID NO: 185493 - DNA, 17 bp, synthetic construct
  source 1..17: mol_type = other DNA
ttctcaggatggggcag

SEQ ID NO: 185494 - DNA, 17 bp, synthetic construct
  source 1..17: mol_type = other DNA
cttctcaggatggggca

SEQ ID NO: 185495 - DNA, 17 bp, synthetic construct
  source 1..17: mol_type = other DNA
ccttctcaggatggggc

SEQ ID NO: 185496 - DNA, 17 bp, synthetic construct
  source 1..17: mol_type = other DNA
accttctcaggatgggg

SEQ ID NO: 185497 - DNA, 17 bp, synthetic construct
  source 1..17: mol_type = other DNA
caccttctcaggatggg

SEQ ID NO: 185498 - DNA, 17 bp, synthetic construct
  source 1..17: mol_type = other DNA
tcaccttctcaggatgg

SEQ ID NO: 185499 - DNA, 17 bp, synthetic construct
  source 1..17: mol_type = other DNA
ttcaccttctcaggatg

SEQ ID NO: 185500 - DNA, 17 bp, synthetic construct
  source 1..17: mol_type = other DNA
cttcaccttctcaggat

SEQ ID NO: 185501 - DNA, 17 bp, synthetic construct
  source 1..17: mol_type = other DNA
gcttcaccttctcagga

SEQ ID NO: 185502 - DNA, 17 bp, synthetic construct
  source 1..17: mol_type = other DNA
ggcttcaccttctcagg

SEQ ID NO: 185503 - DNA, 17 bp, synthetic construct
  source 1..17: mol_type = other DNA
aggcttcaccttctcag

SEQ ID NO: 185504 - DNA, 17 bp, synthetic construct
  source 1..17: mol_type = other DNA
gaggcttcaccttctca

SEQ ID NO: 185505 - DNA, 17 bp, synthetic construct
  source 1..17: mol_type = other DNA
tgaggcttcaccttctc

SEQ ID NO: 185506 - DNA, 17 bp, synthetic construct
  source 1..17: mol_type = other DNA
gtgaggcttcaccttct

SEQ ID NO: 185507 - DNA, 17 bp, synthetic construct
  source 1..17: mol_type = other DNA
cgtgaggcttcaccttc

SEQ ID NO: 185508 - DNA, 17 bp, synthetic construct
  source 1..17: mol_type = other DNA
acgtgaggcttcacctt

SEQ ID NO: 185509 - DNA, 17 bp, synthetic construct
  source 1..17: mol_type = other DNA
cacgtgaggcttcacct

SEQ ID NO: 185510 - DNA, 17 bp, synthetic construct
  source 1..17: mol_type = other DNA
gcacgtgaggcttcacc

SEQ ID NO: 185511 - DNA, 17 bp, synthetic construct
  source 1..17: mol_type = other DNA
ggcacgtgaggcttcac

SEQ ID NO: 185512 - DNA, 17 bp, synthetic construct
  source 1..17: mol_type = other DNA
gggcacgtgaggcttca

SEQ ID NO: 185513 - DNA, 17 bp, synthetic construct
  source 1..17: mol_type = other DNA
tgggcacgtgaggcttc

SEQ ID NO: 185514 - DNA, 17 bp, synthetic construct
  source 1..17: mol_type = other DNA
gtgggcacgtgaggctt

SEQ ID NO: 185515 - DNA, 17 bp, synthetic construct
  source 1..17: mol_type = other DNA
tgtgggcacgtgaggct

SEQ ID NO: 185516 - DNA, 17 bp, synthetic construct
  source 1..17: mol_type = other DNA
ctgtgggcacgtgaggc

SEQ ID NO: 185517 - DNA, 17 bp, synthetic construct
  source 1..17: mol_type = other DNA
tctgtgggcacgtgagg

SEQ ID NO: 185518 - DNA, 17 bp, synthetic construct
  source 1..17: mol_type = other DNA
ctctgtgggcacgtgag

SEQ ID NO: 185519 - DNA, 17 bp, synthetic construct
  source 1..17: mol_type = other DNA
gctctgtgggcacgtga

SEQ ID NO: 185520 - DNA, 17 bp, synthetic construct
  source 1..17: mol_type = other DNA
tgctctgtgggcacgtg

SEQ ID NO: 185521 - DNA, 17 bp, synthetic construct
  source 1..17: mol_type = other DNA
ctgctctgtgggcacgt

SEQ ID NO: 185522 - DNA, 17 bp, synthetic construct
  source 1..17: mol_type = other DNA
cctgctctgtgggcacg

SEQ ID NO: 185523 - DNA, 17 bp, synthetic construct
  source 1..17: mol_type = other DNA
gcctgctctgtgggcac

SEQ ID NO: 185524 - DNA, 17 bp, synthetic construct
  source 1..17: mol_type = other DNA
ggcctgctctgtgggca

SEQ ID NO: 185525 - DNA, 17 bp, synthetic construct
  source 1..17: mol_type = other DNA
tggcctgctctgtgggc

SEQ ID NO: 185526 - DNA, 17 bp, synthetic construct
  source 1..17: mol_type = other DNA
gtggcctgctctgtggg

SEQ ID NO: 185527 - DNA, 17 bp, synthetic construct
  source 1..17: mol_type = other DNA
agtggcctgctctgtgg

SEQ ID NO: 185528 - DNA, 17 bp, synthetic construct
  source 1..17: mol_type = other DNA
cagtggcctgctctgtg

SEQ ID NO: 185529 - DNA, 17 bp, synthetic construct
  source 1..17: mol_type = other DNA
acagtggcctgctctgt

SEQ ID NO: 185530 - DNA, 17 bp, synthetic construct
  source 1..17: mol_type = other DNA
cacagtggcctgctctg

SEQ ID NO: 185531 - DNA, 17 bp, synthetic construct
  source 1..17: mol_type = other DNA
ccacagtggcctgctct

SEQ ID NO: 185532 - DNA, 17 bp, synthetic construct
  source 1..17: mol_type = other DNA
tccacagtggcctgctc

SEQ ID NO: 185533 - DNA, 17 bp, synthetic construct
  source 1..17: mol_type = other DNA
gtccacagtggcctgct

SEQ ID NO: 185534 - DNA, 17 bp, synthetic construct
  source 1..17: mol_type = other DNA
tgtccacagtggcctgc

SEQ ID NO: 185535 - DNA, 17 bp, synthetic construct
  source 1..17: mol_type = other DNA
ctgtccacagtggcctg

SEQ ID NO: 185536 - DNA, 17 bp, synthetic construct
  source 1..17: mol_type = other DNA
tctgtccacagtggcct

SEQ ID NO: 185537 - DNA, 17 bp, synthetic construct
  source 1..17: mol_type = other DNA
ttctgtccacagtggcc

SEQ ID NO: 185538 - DNA, 17 bp, synthetic construct
  source 1..17: mol_type = other DNA
cttctgtccacagtggc

SEQ ID NO: 185539 - DNA, 17 bp, synthetic construct
  source 1..17: mol_type = other DNA
ccttctgtccacagtgg

SEQ ID NO: 185540 - DNA, 17 bp, synthetic construct
  source 1..17: mol_type = other DNA
cccttctgtccacagtg

SEQ ID NO: 185541 - DNA, 17 bp, synthetic construct
  source 1..17: mol_type = other DNA
ccccttctgtccacagt

SEQ ID NO: 185542 - DNA, 17 bp, synthetic construct
  source 1..17: mol_type = other DNA
cccccttctgtccacag

SEQ ID NO: 185543 - DNA, 17 bp, synthetic construct
  source 1..17: mol_type = other DNA
gcccccttctgtccaca

SEQ ID NO: 185544 - DNA, 17 bp, synthetic construct
  source 1..17: mol_type = other DNA
cgcccccttctgtccac

SEQ ID NO: 185545 - DNA, 17 bp, synthetic construct
  source 1..17: mol_type = other DNA
ccgcccccttctgtcca

SEQ ID NO: 185546 - DNA, 17 bp, synthetic construct
  source 1..17: mol_type = other DNA
gccgcccccttctgtcc

SEQ ID NO: 185547 - DNA, 17 bp, synthetic construct
  source 1..17: mol_type = other DNA
ggccgcccccttctgtc

SEQ ID NO: 185548 - DNA, 17 bp, synthetic construct
  source 1..17: mol_type = other DNA
cggccgcccccttctgt

SEQ ID NO: 185549 - DNA, 17 bp, synthetic construct
  source 1..17: mol_type = other DNA
acggccgcccccttctg

SEQ ID NO: 185550 - DNA, 17 bp, synthetic construct
  source 1..17: mol_type = other DNA
gacggccgcccccttct

SEQ ID NO: 185551 - DNA, 17 bp, synthetic construct
  source 1..17: mol_type = other DNA
agacggccgcccccttc

SEQ ID NO: 185552 - DNA, 17 bp, synthetic construct
  source 1..17: mol_type = other DNA
cagacggccgccccctt

SEQ ID NO: 185553 - DNA, 17 bp, synthetic construct
  source 1..17: mol_type = other DNA
ccagacggccgccccct

SEQ ID NO: 185554 - DNA, 17 bp, synthetic construct
  source 1..17: mol_type = other DNA
gccagacggccgccccc

SEQ ID NO: 185555 - DNA, 17 bp, synthetic construct
  source 1..17: mol_type = other DNA
ggccagacggccgcccc

SEQ ID NO: 185556 - DNA, 17 bp, synthetic construct
  source 1..17: mol_type = other DNA
gggccagacggccgccc

SEQ ID NO: 185557 - DNA, 17 bp, synthetic construct
  source 1..17: mol_type = other DNA
tgggccagacggccgcc

SEQ ID NO: 185558 - DNA, 17 bp, synthetic construct
  source 1..17: mol_type = other DNA
ctgggccagacggccgc

SEQ ID NO: 185559 - DNA, 17 bp, synthetic construct
  source 1..17: mol_type = other DNA
cctgggccagacggccg

SEQ ID NO: 185560 - DNA, 17 bp, synthetic construct
  source 1..17: mol_type = other DNA
tcctgggccagacggcc

SEQ ID NO: 185561 - DNA, 17 bp, synthetic construct
  source 1..17: mol_type = other DNA
gtcctgggccagacggc

SEQ ID NO: 185562 - DNA, 17 bp, synthetic construct
  source 1..17: mol_type = other DNA
ggtcctgggccagacgg

SEQ ID NO: 185563 - DNA, 17 bp, synthetic construct
  source 1..17: mol_type = other DNA
gggtcctgggccagacg

SEQ ID NO: 185564 - DNA, 17 bp, synthetic construct
  source 1..17: mol_type = other DNA
ggggtcctgggccagac

SEQ ID NO: 185565 - DNA, 17 bp, synthetic construct
  source 1..17: mol_type = other DNA
tggggtcctgggccaga

SEQ ID NO: 185566 - DNA, 17 bp, synthetic construct
  source 1..17: mol_type = other DNA
ctggggtcctgggccag

SEQ ID NO: 185567 - DNA, 17 bp, synthetic construct
  source 1..17: mol_type = other DNA
tctggggtcctgggcca

SEQ ID NO: 185568 - DNA, 17 bp, synthetic construct
  source 1..17: mol_type = other DNA
ctctggggtcctgggcc

SEQ ID NO: 185569 - DNA, 17 bp, synthetic construct
  source 1..17: mol_type = other DNA
cctctggggtcctgggc

SEQ ID NO: 185570 - DNA, 17 bp, synthetic construct
  source 1..17: mol_type = other DNA
gcctctggggtcctggg

SEQ ID NO: 185571 - DNA, 17 bp, synthetic construct
  source 1..17: mol_type = other DNA
ggcctctggggtcctgg

SEQ ID NO: 185572 - DNA, 17 bp, synthetic construct
  source 1..17: mol_type = other DNA
gggcctctggggtcctg

SEQ ID NO: 185573 - DNA, 17 bp, synthetic construct
  source 1..17: mol_type = other DNA
tgggcctctggggtcct

SEQ ID NO: 185574 - DNA, 17 bp, synthetic construct
  source 1..17: mol_type = other DNA
atgggcctctggggtcc

SEQ ID NO: 185575 - DNA, 17 bp, synthetic construct
  source 1..17: mol_type = other DNA
catgggcctctggggtc

SEQ ID NO: 185576 - DNA, 17 bp, synthetic construct
  source 1..17: mol_type = other DNA
acatgggcctctggggt

SEQ ID NO: 185577 - DNA, 17 bp, synthetic construct
  source 1..17: mol_type = other DNA
cacatgggcctctgggg

SEQ ID NO: 185578 - DNA, 17 bp, synthetic construct
  source 1..17: mol_type = other DNA
acacatgggcctctggg

SEQ ID NO: 185579 - DNA, 17 bp, synthetic construct
  source 1..17: mol_type = other DNA
gacacatgggcctctgg

SEQ ID NO: 185580 - DNA, 17 bp, synthetic construct
  source 1..17: mol_type = other DNA
tgacacatgggcctctg

SEQ ID NO: 185581 - DNA, 17 bp, synthetic construct
  source 1..17: mol_type = other DNA
gtgacacatgggcctct

SEQ ID NO: 185582 - DNA, 17 bp, synthetic construct
  source 1..17: mol_type = other DNA
ggtgacacatgggcctc

SEQ ID NO: 185583 - DNA, 17 bp, synthetic construct
  source 1..17: mol_type = other DNA
tggtgacacatgggcct

SEQ ID NO: 185584 - DNA, 17 bp, synthetic construct
  source 1..17: mol_type = other DNA
atggtgacacatgggcc

SEQ ID NO: 185585 - DNA, 17 bp, synthetic construct
  source 1..17: mol_type = other DNA
catggtgacacatgggc

SEQ ID NO: 185586 - DNA, 17 bp, synthetic construct
  source 1..17: mol_type = other DNA
ccatggtgacacatggg

SEQ ID NO: 185587 - DNA, 17 bp, synthetic construct
  source 1..17: mol_type = other DNA
gccatggtgacacatgg

SEQ ID NO: 185588 - DNA, 17 bp, synthetic construct
  source 1..17: mol_type = other DNA
agccatggtgacacatg

SEQ ID NO: 185589 - DNA, 17 bp, synthetic construct
  source 1..17: mol_type = other DNA
cagccatggtgacacat

SEQ ID NO: 185590 - DNA, 17 bp, synthetic construct
  source 1..17: mol_type = other DNA
ccagccatggtgacaca

SEQ ID NO: 185591 - DNA, 17 bp, synthetic construct
  source 1..17: mol_type = other DNA
cccagccatggtgacac

SEQ ID NO: 185592 - DNA, 17 bp, synthetic construct
  source 1..17: mol_type = other DNA
gcccagccatggtgaca

SEQ ID NO: 185593 - DNA, 17 bp, synthetic construct
  source 1..17: mol_type = other DNA
tgcccagccatggtgac

SEQ ID NO: 185594 - DNA, 17 bp, synthetic construct
  source 1..17: mol_type = other DNA
ctgcccagccatggtga

SEQ ID NO: 185595 - DNA, 17 bp, synthetic construct
  source 1..17: mol_type = other DNA
tctgcccagccatggtg

SEQ ID NO: 185596 - DNA, 17 bp, synthetic construct
  source 1..17: mol_type = other DNA
ctctgcccagccatggt

SEQ ID NO: 185597 - DNA, 17 bp, synthetic construct
  source 1..17: mol_type = other DNA
tctctgcccagccatgg

SEQ ID NO: 185598 - DNA, 17 bp, synthetic construct
  source 1..17: mol_type = other DNA
ttctctgcccagccatg

SEQ ID NO: 185599 - DNA, 17 bp, synthetic construct
  source 1..17: mol_type = other DNA
tttctctgcccagccat

SEQ ID NO: 185600 - DNA, 17 bp, synthetic construct
  source 1..17: mol_type = other DNA
gtttctctgcccagcca

SEQ ID NO: 185601 - DNA, 17 bp, synthetic construct
  source 1..17: mol_type = other DNA
cgtttctctgcccagcc

SEQ ID NO: 185602 - DNA, 17 bp, synthetic construct
  source 1..17: mol_type = other DNA
ccgtttctctgcccagc

SEQ ID NO: 185603 - DNA, 17 bp, synthetic construct
  source 1..17: mol_type = other DNA
gccgtttctctgcccag

SEQ ID NO: 185604 - DNA, 17 bp, synthetic construct
  source 1..17: mol_type = other DNA
cgccgtttctctgccca

SEQ ID NO: 185605 - DNA, 17 bp, synthetic construct
  source 1..17: mol_type = other DNA
ccgccgtttctctgccc

SEQ ID NO: 185606 - DNA, 17 bp, synthetic construct
  source 1..17: mol_type = other DNA
cccgccgtttctctgcc

SEQ ID NO: 185607 - DNA, 17 bp, synthetic construct
  source 1..17: mol_type = other DNA
ccccgccgtttctctgc

SEQ ID NO: 185608 - DNA, 17 bp, synthetic construct
  source 1..17: mol_type = other DNA
gccccgccgtttctctg

SEQ ID NO: 185609 - DNA, 17 bp, synthetic construct
  source 1..17: mol_type = other DNA
ggccccgccgtttctct

SEQ ID NO: 185610 - DNA, 17 bp, synthetic construct
  source 1..17: mol_type = other DNA
tggccccgccgtttctc

SEQ ID NO: 185611 - DNA, 17 bp, synthetic construct
  source 1..17: mol_type = other DNA
ttggccccgccgtttct

SEQ ID NO: 185612 - DNA, 17 bp, synthetic construct
  source 1..17: mol_type = other DNA
cttggccccgccgtttc

SEQ ID NO: 185613 - DNA, 17 bp, synthetic construct
  source 1..17: mol_type = other DNA
ccttggccccgccgttt

SEQ ID NO: 185614 - DNA, 17 bp, synthetic construct
  source 1..17: mol_type = other DNA
accttggccccgccgtt

SEQ ID NO: 185615 - DNA, 17 bp, synthetic construct
  source 1..17: mol_type = other DNA
caccttggccccgccgt

SEQ ID NO: 185616 - DNA, 17 bp, synthetic construct
  source 1..17: mol_type = other DNA
ccaccttggccccgccg

SEQ ID NO: 185617 - DNA, 17 bp, synthetic construct
  source 1..17: mol_type = other DNA
gccaccttggccccgcc

SEQ ID NO: 185618 - DNA, 17 bp, synthetic construct
  source 1..17: mol_type = other DNA
agccaccttggccccgc

SEQ ID NO: 185619 - DNA, 17 bp, synthetic construct
  source 1..17: mol_type = other DNA
cagccaccttggccccg

SEQ ID NO: 185620 - DNA, 17 bp, synthetic construct
  source 1..17: mol_type = other DNA
tcagccaccttggcccc

SEQ ID NO: 185621 - DNA, 17 bp, synthetic construct
  source 1..17: mol_type = other DNA
atcagccaccttggccc

SEQ ID NO: 185622 - DNA, 17 bp, synthetic construct
  source 1..17: mol_type = other DNA
catcagccaccttggcc

SEQ ID NO: 185623 - DNA, 17 bp, synthetic construct
  source 1..17: mol_type = other DNA
acatcagccaccttggc

SEQ ID NO: 185624 - DNA, 17 bp, synthetic construct
  source 1..17: mol_type = other DNA
cacatcagccaccttgg

SEQ ID NO: 185625 - DNA, 17 bp, synthetic construct
  source 1..17: mol_type = other DNA
tcacatcagccaccttg

SEQ ID NO: 185626 - DNA, 17 bp, synthetic construct
  source 1..17: mol_type = other DNA
ctcacatcagccacctt

SEQ ID NO: 185627 - DNA, 17 bp, synthetic construct
  source 1..17: mol_type = other DNA
cctcacatcagccacct

SEQ ID NO: 185628 - DNA, 17 bp, synthetic construct
  source 1..17: mol_type = other DNA
ccctcacatcagccacc

SEQ ID NO: 185629 - DNA, 17 bp, synthetic construct
  source 1..17: mol_type = other DNA
gccctcacatcagccac

SEQ ID NO: 185630 - DNA, 17 bp, synthetic construct
  source 1..17: mol_type = other DNA
ggccctcacatcagcca

SEQ ID NO: 185631 - DNA, 17 bp, synthetic construct
  source 1..17: mol_type = other DNA
tggccctcacatcagcc

SEQ ID NO: 185632 - DNA, 17 bp, synthetic construct
  source 1..17: mol_type = other DNA
gtggccctcacatcagc

SEQ ID NO: 185633 - DNA, 17 bp, synthetic construct
  source 1..17: mol_type = other DNA
ggtggccctcacatcag

SEQ ID NO: 185634 - DNA, 17 bp, synthetic construct
  source 1..17: mol_type = other DNA
gggtggccctcacatca

SEQ ID NO: 185635 - DNA, 17 bp, synthetic construct
  source 1..17: mol_type = other DNA
agggtggccctcacatc

SEQ ID NO: 185636 - DNA, 17 bp, synthetic construct
  source 1..17: mol_type = other DNA
cagggtggccctcacat

SEQ ID NO: 185637 - DNA, 17 bp, synthetic construct
  source 1..17: mol_type = other DNA
gcagggtggccctcaca

SEQ ID NO: 185638 - DNA, 17 bp, synthetic construct
  source 1..17: mol_type = other DNA
cgcagggtggccctcac

SEQ ID NO: 185639 - DNA, 17 bp, synthetic construct
  source 1..17: mol_type = other DNA
acgcagggtggccctca

SEQ ID NO: 185640 - DNA, 17 bp, synthetic construct
  source 1..17: mol_type = other DNA
gacgcagggtggccctc

SEQ ID NO: 185641 - DNA, 17 bp, synthetic construct
  source 1..17: mol_type = other DNA
ggacgcagggtggccct

SEQ ID NO: 185642 - DNA, 17 bp, synthetic construct
  source 1..17: mol_type = other DNA
tggacgcagggtggccc

SEQ ID NO: 185643 - DNA, 17 bp, synthetic construct
  source 1..17: mol_type = other DNA
gtggacgcagggtggcc

SEQ ID NO: 185644 - DNA, 17 bp, synthetic construct
  source 1..17: mol_type = other DNA
tgtggacgcagggtggc

SEQ ID NO: 185645 - DNA, 17 bp, synthetic construct
  source 1..17: mol_type = other DNA
ctgtggacgcagggtgg

SEQ ID NO: 185646 - DNA, 17 bp, synthetic construct
  source 1..17: mol_type = other DNA
cctgtggacgcagggtg

SEQ ID NO: 185647 - DNA, 17 bp, synthetic construct
  source 1..17: mol_type = other DNA
acctgtggacgcagggt

SEQ ID NO: 185648 - DNA, 17 bp, synthetic construct
  source 1..17: mol_type = other DNA
tacctgtggacgcaggg

SEQ ID NO: 185649 - DNA, 17 bp, synthetic construct
  source 1..17: mol_type = other DNA
gtacctgtggacgcagg

SEQ ID NO: 185650 - DNA, 17 bp, synthetic construct
  source 1..17: mol_type = other DNA
agtacctgtggacgcag

SEQ ID NO: 185651 - DNA, 17 bp, synthetic construct
  source 1..17: mol_type = other DNA
gagtacctgtggacgca

SEQ ID NO: 185652 - DNA, 17 bp, synthetic construct
  source 1..17: mol_type = other DNA
tgagtacctgtggacgc

SEQ ID NO: 185653 - DNA, 17 bp, synthetic construct
  source 1..17: mol_type = other DNA
ctgagtacctgtggacg

SEQ ID NO: 185654 - DNA, 17 bp, synthetic construct
  source 1..17: mol_type = other DNA
gctgagtacctgtggac

SEQ ID NO: 185655 - DNA, 17 bp, synthetic construct
  source 1..17: mol_type = other DNA
tgctgagtacctgtgga

SEQ ID NO: 185656 - DNA, 17 bp, synthetic construct
  source 1..17: mol_type = other DNA
ctgctgagtacctgtgg

SEQ ID NO: 185657 - DNA, 17 bp, synthetic construct
  source 1..17: mol_type = other DNA
tctgctgagtacctgtg

SEQ ID NO: 185658 - DNA, 17 bp, synthetic construct
  source 1..17: mol_type = other DNA
ctctgctgagtacctgt

SEQ ID NO: 185659 - DNA, 17 bp, synthetic construct
  source 1..17: mol_type = other DNA
cctctgctgagtacctg

SEQ ID NO: 185660 - DNA, 17 bp, synthetic construct
  source 1..17: mol_type = other DNA
gcctctgctgagtacct

SEQ ID NO: 185661 - DNA, 17 bp, synthetic construct
  source 1..17: mol_type = other DNA
ggcctctgctgagtacc

SEQ ID NO: 185662 - DNA, 17 bp, synthetic construct
  source 1..17: mol_type = other DNA
gggcctctgctgagtac

SEQ ID NO: 185663 - DNA, 17 bp, synthetic construct
  source 1..17: mol_type = other DNA
tgggcctctgctgagta

SEQ ID NO: 185664 - DNA, 17 bp, synthetic construct
  source 1..17: mol_type = other DNA
ctgggcctctgctgagt

SEQ ID NO: 185665 - DNA, 17 bp, synthetic construct
  source 1..17: mol_type = other DNA
cctgggcctctgctgag

SEQ ID NO: 185666 - DNA, 17 bp, synthetic construct
  source 1..17: mol_type = other DNA
gcctgggcctctgctga

SEQ ID NO: 185667 - DNA, 17 bp, synthetic construct
  source 1..17: mol_type = other DNA
ggcctgggcctctgctg

SEQ ID NO: 185668 - DNA, 17 bp, synthetic construct
  source 1..17: mol_type = other DNA
tggcctgggcctctgct

SEQ ID NO: 185669 - DNA, 17 bp, synthetic construct
  source 1..17: mol_type = other DNA
atggcctgggcctctgc

SEQ ID NO: 185670 - DNA, 17 bp, synthetic construct
  source 1..17: mol_type = other DNA
catggcctgggcctctg

SEQ ID NO: 185671 - DNA, 17 bp, synthetic construct
  source 1..17: mol_type = other DNA
gcatggcctgggcctct

SEQ ID NO: 185672 - DNA, 17 bp, synthetic construct
  source 1..17: mol_type = other DNA
tgcatggcctgggcctc

SEQ ID NO: 185673 - DNA, 17 bp, synthetic construct
  source 1..17: mol_type = other DNA
ctgcatggcctgggcct

SEQ ID NO: 185674 - DNA, 17 bp, synthetic construct
  source 1..17: mol_type = other DNA
gctgcatggcctgggcc

SEQ ID NO: 185675 - DNA, 17 bp, synthetic construct
  source 1..17: mol_type = other DNA
tgctgcatggcctgggc

SEQ ID NO: 185676 - DNA, 17 bp, synthetic construct
  source 1..17: mol_type = other DNA
gtgctgcatggcctggg

SEQ ID NO: 185677 - DNA, 17 bp, synthetic construct
  source 1..17: mol_type = other DNA
ggtgctgcatggcctgg

SEQ ID NO: 185678 - DNA, 17 bp, synthetic construct
  source 1..17: mol_type = other DNA
tggtgctgcatggcctg

SEQ ID NO: 185679 - DNA, 17 bp, synthetic construct
  source 1..17: mol_type = other DNA
ctggtgctgcatggcct

SEQ ID NO: 185680 - DNA, 17 bp, synthetic construct
  source 1..17: mol_type = other DNA
actggtgctgcatggcc

SEQ ID NO: 185681 - DNA, 17 bp, synthetic construct
  source 1..17: mol_type = other DNA
cactggtgctgcatggc

SEQ ID NO: 185682 - DNA, 17 bp, synthetic construct
  source 1..17: mol_type = other DNA
gcactggtgctgcatgg

SEQ ID NO: 185683 - DNA, 17 bp, synthetic construct
  source 1..17: mol_type = other DNA
tgcactggtgctgcatg

SEQ ID NO: 185684 - DNA, 17 bp, synthetic construct
  source 1..17: mol_type = other DNA
gtgcactggtgctgcat

SEQ ID NO: 185685 - DNA, 17 bp, synthetic construct
  source 1..17: mol_type = other DNA
ggtgcactggtgctgca

SEQ ID NO: 185686 - DNA, 17 bp, synthetic construct
  source 1..17: mol_type = other DNA
aggtgcactggtgctgc

SEQ ID NO: 185687 - DNA, 17 bp, synthetic construct
  source 1..17: mol_type = other DNA
caggtgcactggtgctg

SEQ ID NO: 185688 - DNA, 17 bp, synthetic construct
  source 1..17: mol_type = other DNA
gcaggtgcactggtgct

SEQ ID NO: 185689 - DNA, 17 bp, synthetic construct
  source 1..17: mol_type = other DNA
agcaggtgcactggtgc

SEQ ID NO: 185690 - DNA, 17 bp, synthetic construct
  source 1..17: mol_type = other DNA
cagcaggtgcactggtg

SEQ ID NO: 185691 - DNA, 17 bp, synthetic construct
  source 1..17: mol_type = other DNA
gcagcaggtgcactggt

SEQ ID NO: 185692 - DNA, 17 bp, synthetic construct
  source 1..17: mol_type = other DNA
ggcagcaggtgcactgg

SEQ ID NO: 185693 - DNA, 17 bp, synthetic construct
  source 1..17: mol_type = other DNA
tggcagcaggtgcactg

SEQ ID NO: 185694 - DNA, 17 bp, synthetic construct
  source 1..17: mol_type = other DNA
ctggcagcaggtgcact

SEQ ID NO: 185695 - DNA, 17 bp, synthetic construct
  source 1..17: mol_type = other DNA
cctggcagcaggtgcac

SEQ ID NO: 185696 - DNA, 17 bp, synthetic construct
  source 1..17: mol_type = other DNA
tcctggcagcaggtgca

SEQ ID NO: 185697 - DNA, 17 bp, synthetic construct
  source 1..17: mol_type = other DNA
ctcctggcagcaggtgc

SEQ ID NO: 185698 - DNA, 17 bp, synthetic construct
  source 1..17: mol_type = other DNA
tctcctggcagcaggtg

SEQ ID NO: 185699 - DNA, 17 bp, synthetic construct
  source 1..17: mol_type = other DNA
ctctcctggcagcaggt

SEQ ID NO: 185700 - DNA, 17 bp, synthetic construct
  source 1..17: mol_type = other DNA
cctctcctggcagcagg

SEQ ID NO: 185701 - DNA, 17 bp, synthetic construct
  source 1..17: mol_type = other DNA
gcctctcctggcagcag

SEQ ID NO: 185702 - DNA, 17 bp, synthetic construct
  source 1..17: mol_type = other DNA
cgcctctcctggcagca

SEQ ID NO: 185703 - DNA, 17 bp, synthetic construct
  source 1..17: mol_type = other DNA
ccgcctctcctggcagc

SEQ ID NO: 185704 - DNA, 17 bp, synthetic construct
  source 1..17: mol_type = other DNA
cccgcctctcctggcag

SEQ ID NO: 185705 - DNA, 17 bp, synthetic construct
  source 1..17: mol_type = other DNA
acccgcctctcctggca

SEQ ID NO: 185706 - DNA, 17 bp, synthetic construct
  source 1..17: mol_type = other DNA
gacccgcctctcctggc

SEQ ID NO: 185707 - DNA, 17 bp, synthetic construct
  source 1..17: mol_type = other DNA
ggacccgcctctcctgg

SEQ ID NO: 185708 - DNA, 17 bp, synthetic construct
  source 1..17: mol_type = other DNA
tggacccgcctctcctg

SEQ ID NO: 185709 - DNA, 17 bp, synthetic construct
  source 1..17: mol_type = other DNA
gtggacccgcctctcct

SEQ ID NO: 185710 - DNA, 17 bp, synthetic construct
  source 1..17: mol_type = other DNA
cgtggacccgcctctcc

SEQ ID NO: 185711 - DNA, 17 bp, synthetic construct
  source 1..17: mol_type = other DNA
tcgtggacccgcctctc

SEQ ID NO: 185712 - DNA, 17 bp, synthetic construct
  source 1..17: mol_type = other DNA
ctcgtggacccgcctct

SEQ ID NO: 185713 - DNA, 17 bp, synthetic construct
  source 1..17: mol_type = other DNA
cctcgtggacccgcctc

SEQ ID NO: 185714 - DNA, 17 bp, synthetic construct
  source 1..17: mol_type = other DNA
tcctcgtggacccgcct

SEQ ID NO: 185715 - DNA, 17 bp, synthetic construct
  source 1..17: mol_type = other DNA
ctcctcgtggacccgcc

SEQ ID NO: 185716 - DNA, 17 bp, synthetic construct
  source 1..17: mol_type = other DNA
tctcctcgtggacccgc

SEQ ID NO: 185717 - DNA, 17 bp, synthetic construct
  source 1..17: mol_type = other DNA
gtctcctcgtggacccg

SEQ ID NO: 185718 - DNA, 17 bp, synthetic construct
  source 1..17: mol_type = other DNA
cgtctcctcgtggaccc

SEQ ID NO: 185719 - DNA, 17 bp, synthetic construct
  source 1..17: mol_type = other DNA
ccgtctcctcgtggacc

SEQ ID NO: 185720 - DNA, 17 bp, synthetic construct
  source 1..17: mol_type = other DNA
accgtctcctcgtggac

SEQ ID NO: 185721 - DNA, 17 bp, synthetic construct
  source 1..17: mol_type = other DNA
caccgtctcctcgtgga

SEQ ID NO: 185722 - DNA, 17 bp, synthetic construct
  source 1..17: mol_type = other DNA
gcaccgtctcctcgtgg

SEQ ID NO: 185723 - DNA, 17 bp, synthetic construct
  source 1..17: mol_type = other DNA
ggcaccgtctcctcgtg

SEQ ID NO: 185724 - DNA, 17 bp, synthetic construct
  source 1..17: mol_type = other DNA
gggcaccgtctcctcgt

SEQ ID NO: 185725 - DNA, 17 bp, synthetic construct
  source 1..17: mol_type = other DNA
agggcaccgtctcctcg

SEQ ID NO: 185726 - DNA, 17 bp, synthetic construct
  source 1..17: mol_type = other DNA
aagggcaccgtctcctc

SEQ ID NO: 185727 - DNA, 17 bp, synthetic construct
  source 1..17: mol_type = other DNA
caagggcaccgtctcct

SEQ ID NO: 185728 - DNA, 17 bp, synthetic construct
  source 1..17: mol_type = other DNA
gcaagggcaccgtctcc

SEQ ID NO: 185729 - DNA, 17 bp, synthetic construct
  source 1..17: mol_type = other DNA
tgcaagggcaccgtctc

SEQ ID NO: 185730 - DNA, 17 bp, synthetic construct
  source 1..17: mol_type = other DNA
gtgcaagggcaccgtct

SEQ ID NO: 185731 - DNA, 17 bp, synthetic construct
  source 1..17: mol_type = other DNA
agtgcaagggcaccgtc

SEQ ID NO: 185732 - DNA, 17 bp, synthetic construct
  source 1..17: mol_type = other DNA
cagtgcaagggcaccgt

SEQ ID NO: 185733 - DNA, 17 bp, synthetic construct
  source 1..17: mol_type = other DNA
acagtgcaagggcaccg

SEQ ID NO: 185734 - DNA, 17 bp, synthetic construct
  source 1..17: mol_type = other DNA
gacagtgcaagggcacc

SEQ ID NO: 185735 - DNA, 17 bp, synthetic construct
  source 1..17: mol_type = other DNA
ggacagtgcaagggcac

SEQ ID NO: 185736 - DNA, 17 bp, synthetic construct
  source 1..17: mol_type = other DNA
aggacagtgcaagggca

SEQ ID NO: 185737 - DNA, 17 bp, synthetic construct
  source 1..17: mol_type = other DNA
taggacagtgcaagggc

SEQ ID NO: 185738 - DNA, 17 bp, synthetic construct
  source 1..17: mol_type = other DNA
ttaggacagtgcaaggg

SEQ ID NO: 185739 - DNA, 17 bp, synthetic construct
  source 1..17: mol_type = other DNA
gttaggacagtgcaagg

SEQ ID NO: 185740 - DNA, 17 bp, synthetic construct
  source 1..17: mol_type = other DNA
cgttaggacagtgcaag

SEQ ID NO: 185741 - DNA, 17 bp, synthetic construct
  source 1..17: mol_type = other DNA
ccgttaggacagtgcaa

SEQ ID NO: 185742 - DNA, 17 bp, synthetic construct
  source 1..17: mol_type = other DNA
gccgttaggacagtgca

SEQ ID NO: 185743 - DNA, 17 bp, synthetic construct
  source 1..17: mol_type = other DNA
agccgttaggacagtgc

SEQ ID NO: 185744 - DNA, 17 bp, synthetic construct
  source 1..17: mol_type = other DNA
gagccgttaggacagtg

SEQ ID NO: 185745 - DNA, 17 bp, synthetic construct
  source 1..17: mol_type = other DNA
tgagccgttaggacagt

SEQ ID NO: 185746 - DNA, 17 bp, synthetic construct
  source 1..17: mol_type = other DNA
ctgagccgttaggacag

SEQ ID NO: 185747 - DNA, 17 bp, synthetic construct
  source 1..17: mol_type = other DNA
gctgagccgttaggaca

SEQ ID NO: 185748 - DNA, 17 bp, synthetic construct
  source 1..17: mol_type = other DNA
ggctgagccgttaggac

SEQ ID NO: 185749 - DNA, 17 bp, synthetic construct
  source 1..17: mol_type = other DNA
tggctgagccgttagga

SEQ ID NO: 185750 - DNA, 17 bp, synthetic construct
  source 1..17: mol_type = other DNA
atggctgagccgttagg

SEQ ID NO: 185751 - DNA, 17 bp, synthetic construct
  source 1..17: mol_type = other DNA
gatggctgagccgttag

SEQ ID NO: 185752 - DNA, 17 bp, synthetic construct
  source 1..17: mol_type = other DNA
ggatggctgagccgtta

SEQ ID NO: 185753 - DNA, 17 bp, synthetic construct
  source 1..17: mol_type = other DNA
aggatggctgagccgtt

SEQ ID NO: 185754 - DNA, 17 bp, synthetic construct
  source 1..17: mol_type = other DNA
caggatggctgagccgt

SEQ ID NO: 185755 - DNA, 17 bp, synthetic construct
  source 1..17: mol_type = other DNA
gcaggatggctgagccg

SEQ ID NO: 185756 - DNA, 17 bp, synthetic construct
  source 1..17: mol_type = other DNA
tgcaggatggctgagcc

SEQ ID NO: 185757 - DNA, 17 bp, synthetic construct
  source 1..17: mol_type = other DNA
gtgcaggatggctgagc

SEQ ID NO: 185758 - DNA, 17 bp, synthetic construct
  source 1..17: mol_type = other DNA
tgtgcaggatggctgag

SEQ ID NO: 185759 - DNA, 17 bp, synthetic construct
  source 1..17: mol_type = other DNA
gtgtgcaggatggctga

SEQ ID NO: 185760 - DNA, 17 bp, synthetic construct
  source 1..17: mol_type = other DNA
ggtgtgcaggatggctg

SEQ ID NO: 185761 - DNA, 17 bp, synthetic construct
  source 1..17: mol_type = other DNA
aggtgtgcaggatggct

SEQ ID NO: 185762 - DNA, 17 bp, synthetic construct
  source 1..17: mol_type = other DNA
taggtgtgcaggatggc

SEQ ID NO: 185763 - DNA, 17 bp, synthetic construct
  source 1..17: mol_type = other DNA
gtaggtgtgcaggatgg

SEQ ID NO: 185764 - DNA, 17 bp, synthetic construct
  source 1..17: mol_type = other DNA
tgtaggtgtgcaggatg

SEQ ID NO: 185765 - DNA, 17 bp, synthetic construct
  source 1..17: mol_type = other DNA
gtgtaggtgtgcaggat

SEQ ID NO: 185766 - DNA, 17 bp, synthetic construct
  source 1..17: mol_type = other DNA
ggtgtaggtgtgcagga

SEQ ID NO: 185767 - DNA, 17 bp, synthetic construct
  source 1..17: mol_type = other DNA
gggtgtaggtgtgcagg

SEQ ID NO: 185768 - DNA, 17 bp, synthetic construct
  source 1..17: mol_type = other DNA
tgggtgtaggtgtgcag

SEQ ID NO: 185769 - DNA, 17 bp, synthetic construct
  source 1..17: mol_type = other DNA
gtgggtgtaggtgtgca

SEQ ID NO: 185770 - DNA, 17 bp, synthetic construct
  source 1..17: mol_type = other DNA
cgtgggtgtaggtgtgc

SEQ ID NO: 185771 - DNA, 17 bp, synthetic construct
  source 1..17: mol_type = other DNA
acgtgggtgtaggtgtg

SEQ ID NO: 185772 - DNA, 17 bp, synthetic construct
  source 1..17: mol_type = other DNA
cacgtgggtgtaggtgt

SEQ ID NO: 185773 - DNA, 17 bp, synthetic construct
  source 1..17: mol_type = other DNA
ccacgtgggtgtaggtg

SEQ ID NO: 185774 - DNA, 17 bp, synthetic construct
  source 1..17: mol_type = other DNA
tccacgtgggtgtaggt

SEQ ID NO: 185775 - DNA, 17 bp, synthetic construct
  source 1..17: mol_type = other DNA
atccacgtgggtgtagg

SEQ ID NO: 185776 - DNA, 17 bp, synthetic construct
  source 1..17: mol_type = other DNA
catccacgtgggtgtag

SEQ ID NO: 185777 - DNA, 17 bp, synthetic construct
  source 1..17: mol_type = other DNA
tcatccacgtgggtgta

SEQ ID NO: 185778 - DNA, 17 bp, synthetic construct
  source 1..17: mol_type = other DNA
ctcatccacgtgggtgt

SEQ ID NO: 185779 - DNA, 17 bp, synthetic construct
  source 1..17: mol_type = other DNA
actcatccacgtgggtg

SEQ ID NO: 185780 - DNA, 17 bp, synthetic construct
  source 1..17: mol_type = other DNA
cactcatccacgtgggt

SEQ ID NO: 185781 - DNA, 17 bp, synthetic construct
  source 1..17: mol_type = other DNA
acactcatccacgtggg

SEQ ID NO: 185782 - DNA, 17 bp, synthetic construct
  source 1..17: mol_type = other DNA
cacactcatccacgtgg

SEQ ID NO: 185783 - DNA, 17 bp, synthetic construct
  source 1..17: mol_type = other DNA
ccacactcatccacgtg

SEQ ID NO: 185784 - DNA, 17 bp, synthetic construct
  source 1..17: mol_type = other DNA
gccacactcatccacgt

SEQ ID NO: 185785 - DNA, 17 bp, synthetic construct
  source 1..17: mol_type = other DNA
agccacactcatccacg

SEQ ID NO: 185786 - DNA, 17 bp, synthetic construct
  source 1..17: mol_type = other DNA
cagccacactcatccac

SEQ ID NO: 185787 - DNA, 17 bp, synthetic construct
  source 1..17: mol_type = other DNA
gcagccacactcatcca

SEQ ID NO: 185788 - DNA, 17 bp, synthetic construct
  source 1..17: mol_type = other DNA
tgcagccacactcatcc

SEQ ID NO: 185789 - DNA, 17 bp, synthetic construct
  source 1..17: mol_type = other DNA
gtgcagccacactcatc

SEQ ID NO: 185790 - DNA, 17 bp, synthetic construct
  source 1..17: mol_type = other DNA
cgtgcagccacactcat

SEQ ID NO: 185791 - DNA, 17 bp, synthetic construct
  source 1..17: mol_type = other DNA
gcgtgcagccacactca

SEQ ID NO: 185792 - DNA, 17 bp, synthetic construct
  source 1..17: mol_type = other DNA
ggcgtgcagccacactc

SEQ ID NO: 185793 - DNA, 17 bp, synthetic construct
  source 1..17: mol_type = other DNA
gggcgtgcagccacact

SEQ ID NO: 185794 - DNA, 17 bp, synthetic construct
  source 1..17: mol_type = other DNA
agggcgtgcagccacac

SEQ ID NO: 185795 - DNA, 17 bp, synthetic construct
  source 1..17: mol_type = other DNA
aagggcgtgcagccaca

SEQ ID NO: 185796 - DNA, 17 bp, synthetic construct
  source 1..17: mol_type = other DNA
gaagggcgtgcagccac

SEQ ID NO: 185797 - DNA, 17 bp, synthetic construct
  source 1..17: mol_type = other DNA
agaagggcgtgcagcca

SEQ ID NO: 185798 - DNA, 17 bp, synthetic construct
  source 1..17: mol_type = other DNA
cagaagggcgtgcagcc

SEQ ID NO: 185799 - DNA, 17 bp, synthetic construct
  source 1..17: mol_type = other DNA
acagaagggcgtgcagc

SEQ ID NO: 185800 - DNA, 17 bp, synthetic construct
  source 1..17: mol_type = other DNA
cacagaagggcgtgcag

SEQ ID NO: 185801 - DNA, 17 bp, synthetic construct
  source 1..17: mol_type = other DNA
acacagaagggcgtgca

SEQ ID NO: 185802 - DNA, 17 bp, synthetic construct
  source 1..17: mol_type = other DNA
gacacagaagggcgtgc

SEQ ID NO: 185803 - DNA, 17 bp, synthetic construct
  source 1..17: mol_type = other DNA
ggacacagaagggcgtg

SEQ ID NO: 185804 - DNA, 17 bp, synthetic construct
  source 1..17: mol_type = other DNA
gggacacagaagggcgt

SEQ ID NO: 185805 - DNA, 17 bp, synthetic construct
  source 1..17: mol_type = other DNA
agggacacagaagggcg

SEQ ID NO: 185806 - DNA, 17 bp, synthetic construct
  source 1..17: mol_type = other DNA
cagggacacagaagggc

SEQ ID NO: 185807 - DNA, 17 bp, synthetic construct
  source 1..17: mol_type = other DNA
gcagggacacagaaggg

SEQ ID NO: 185808 - DNA, 17 bp, synthetic construct
  source 1..17: mol_type = other DNA
cgcagggacacagaagg

SEQ ID NO: 185809 - DNA, 17 bp, synthetic construct
  source 1..17: mol_type = other DNA
gcgcagggacacagaag

SEQ ID NO: 185810 - DNA, 17 bp, synthetic construct
  source 1..17: mol_type = other DNA
ggcgcagggacacagaa

SEQ ID NO: 185811 - DNA, 17 bp, synthetic construct
  source 1..17: mol_type = other DNA
gggcgcagggacacaga

SEQ ID NO: 185812 - DNA, 17 bp, synthetic construct
  source 1..17: mol_type = other DNA
tgggcgcagggacacag

SEQ ID NO: 185813 - DNA, 17 bp, synthetic construct
  source 1..17: mol_type = other DNA
atgggcgcagggacaca

SEQ ID NO: 185814 - DNA, 17 bp, synthetic construct
  source 1..17: mol_type = other DNA
catgggcgcagggacac

SEQ ID NO: 185815 - DNA, 17 bp, synthetic construct
  source 1..17: mol_type = other DNA
ccatgggcgcagggaca

SEQ ID NO: 185816 - DNA, 17 bp, synthetic construct
  source 1..17: mol_type = other DNA
gccatgggcgcagggac

SEQ ID NO: 185817 - DNA, 17 bp, synthetic construct
  source 1..17: mol_type = other DNA
agccatgggcgcaggga

SEQ ID NO: 185818 - DNA, 17 bp, synthetic construct
  source 1..17: mol_type = other DNA
gagccatgggcgcaggg

SEQ ID NO: 185819 - DNA, 17 bp, synthetic construct
  source 1..17: mol_type = other DNA
ggagccatgggcgcagg

SEQ ID NO: 185820 - DNA, 17 bp, synthetic construct
  source 1..17: mol_type = other DNA
gggagccatgggcgcag

SEQ ID NO: 185821 - DNA, 17 bp, synthetic construct
  source 1..17: mol_type = other DNA
ggggagccatgggcgca

SEQ ID NO: 185822 - DNA, 17 bp, synthetic construct
  source 1..17: mol_type = other DNA
gggggagccatgggcgc

SEQ ID NO: 185823 - DNA, 17 bp, synthetic construct
  source 1..17: mol_type = other DNA
tgggggagccatgggcg

SEQ ID NO: 185824 - DNA, 17 bp, synthetic construct
  source 1..17: mol_type = other DNA
gtgggggagccatgggc

SEQ ID NO: 185825 - DNA, 17 bp, synthetic construct
  source 1..17: mol_type = other DNA
tgtgggggagccatggg

SEQ ID NO: 185826 - DNA, 17 bp, synthetic construct
  source 1..17: mol_type = other DNA
gtgtgggggagccatgg

SEQ ID NO: 185827 - DNA, 17 bp, synthetic construct
  source 1..17: mol_type = other DNA
tgtgtgggggagccatg

SEQ ID NO: 185828 - DNA, 17 bp, synthetic construct
  source 1..17: mol_type = other DNA
gtgtgtgggggagccat

SEQ ID NO: 185829 - DNA, 17 bp, synthetic construct
  source 1..17: mol_type = other DNA
ggtgtgtgggggagcca

SEQ ID NO: 185830 - DNA, 17 bp, synthetic construct
  source 1..17: mol_type = other DNA
gggtgtgtgggggagcc

SEQ ID NO: 185831 - DNA, 17 bp, synthetic construct
  source 1..17: mol_type = other DNA
cgggtgtgtgggggagc

SEQ ID NO: 185832 - DNA, 17 bp, synthetic construct
  source 1..17: mol_type = other DNA
acgggtgtgtgggggag

SEQ ID NO: 185833 - DNA, 17 bp, synthetic construct
  source 1..17: mol_type = other DNA
cacgggtgtgtggggga

SEQ ID NO: 185834 - DNA, 17 bp, synthetic construct
  source 1..17: mol_type = other DNA
ccacgggtgtgtggggg

SEQ ID NO: 185835 - DNA, 17 bp, synthetic construct
  source 1..17: mol_type = other DNA
gccacgggtgtgtgggg

SEQ ID NO: 185836 - DNA, 17 bp, synthetic construct
  source 1..17: mol_type = other DNA
agccacgggtgtgtggg

SEQ ID NO: 185837 - DNA, 17 bp, synthetic construct
  source 1..17: mol_type = other DNA
aagccacgggtgtgtgg

SEQ ID NO: 185838 - DNA, 17 bp, synthetic construct
  source 1..17: mol_type = other DNA
gaagccacgggtgtgtg

SEQ ID NO: 185839 - DNA, 17 bp, synthetic construct
  source 1..17: mol_type = other DNA
ggaagccacgggtgtgt

SEQ ID NO: 185840 - DNA, 17 bp, synthetic construct
  source 1..17: mol_type = other DNA
gggaagccacgggtgtg

SEQ ID NO: 185841 - DNA, 17 bp, synthetic construct
  source 1..17: mol_type = other DNA
cgggaagccacgggtgt

SEQ ID NO: 185842 - DNA, 17 bp, synthetic construct
  source 1..17: mol_type = other DNA
ccgggaagccacgggtg

SEQ ID NO: 185843 - DNA, 17 bp, synthetic construct
  source 1..17: mol_type = other DNA
gccgggaagccacgggt

SEQ ID NO: 185844 - DNA, 17 bp, synthetic construct
  source 1..17: mol_type = other DNA
ggccgggaagccacggg

SEQ ID NO: 185845 - DNA, 17 bp, synthetic construct
  source 1..17: mol_type = other DNA
gggccgggaagccacgg

SEQ ID NO: 185846 - DNA, 17 bp, synthetic construct
  source 1..17: mol_type = other DNA
tgggccgggaagccacg

SEQ ID NO: 185847 - DNA, 17 bp, synthetic construct
  source 1..17: mol_type = other DNA
ctgggccgggaagccac

SEQ ID NO: 185848 - DNA, 17 bp, synthetic construct
  source 1..17: mol_type = other DNA
cctgggccgggaagcca

SEQ ID NO: 185849 - DNA, 17 bp, synthetic construct
  source 1..17: mol_type = other DNA
tcctgggccgggaagcc

SEQ ID NO: 185850 - DNA, 17 bp, synthetic construct
  source 1..17: mol_type = other DNA
ctcctgggccgggaagc

SEQ ID NO: 185851 - DNA, 17 bp, synthetic construct
  source 1..17: mol_type = other DNA
cctcctgggccgggaag

SEQ ID NO: 185852 - DNA, 17 bp, synthetic construct
  source 1..17: mol_type = other DNA
gcctcctgggccgggaa

SEQ ID NO: 185853 - DNA, 17 bp, synthetic construct
  source 1..17: mol_type = other DNA
ggcctcctgggccggga

SEQ ID NO: 185854 - DNA, 17 bp, synthetic construct
  source 1..17: mol_type = other DNA
tggcctcctgggccggg

SEQ ID NO: 185855 - DNA, 17 bp, synthetic construct
  source 1..17: mol_type = other DNA
gtggcctcctgggccgg

SEQ ID NO: 185856 - DNA, 17 bp, synthetic construct
  source 1..17: mol_type = other DNA
agtggcctcctgggccg

SEQ ID NO: 185857 - DNA, 17 bp, synthetic construct
  source 1..17: mol_type = other DNA
cagtggcctcctgggcc

SEQ ID NO: 185858 - DNA, 17 bp, synthetic construct
  source 1..17: mol_type = other DNA
gcagtggcctcctgggc

SEQ ID NO: 185859 - DNA, 17 bp, synthetic construct
  source 1..17: mol_type = other DNA
agcagtggcctcctggg

SEQ ID NO: 185860 - DNA, 17 bp, synthetic construct
  source 1..17: mol_type = other DNA
cagcagtggcctcctgg

SEQ ID NO: 185861 - DNA, 17 bp, synthetic construct
  source 1..17: mol_type = other DNA
acagcagtggcctcctg

SEQ ID NO: 185862 - DNA, 17 bp, synthetic construct
  source 1..17: mol_type = other DNA
gacagcagtggcctcct

SEQ ID NO: 185863 - DNA, 17 bp, synthetic construct
  source 1..17: mol_type = other DNA
agacagcagtggcctcc

SEQ ID NO: 185864 - DNA, 17 bp, synthetic construct
  source 1..17: mol_type = other DNA
cagacagcagtggcctc

SEQ ID NO: 185865 - DNA, 17 bp, synthetic construct
  source 1..17: mol_type = other DNA
tcagacagcagtggcct

SEQ ID NO: 185866 - DNA, 17 bp, synthetic construct
  source 1..17: mol_type = other DNA
ctcagacagcagtggcc

SEQ ID NO: 185867 - DNA, 17 bp, synthetic construct
  source 1..17: mol_type = other DNA
tctcagacagcagtggc

SEQ ID NO: 185868 - DNA, 17 bp, synthetic construct
  source 1..17: mol_type = other DNA
ttctcagacagcagtgg

SEQ ID NO: 185869 - DNA, 17 bp, synthetic construct
  source 1..17: mol_type = other DNA
gttctcagacagcagtg

SEQ ID NO: 185870 - DNA, 17 bp, synthetic construct
  source 1..17: mol_type = other DNA
cgttctcagacagcagt

SEQ ID NO: 185871 - DNA, 17 bp, synthetic construct
  source 1..17: mol_type = other DNA
acgttctcagacagcag

SEQ ID NO: 185872 - DNA, 17 bp, synthetic construct
  source 1..17: mol_type = other DNA
aacgttctcagacagca

SEQ ID NO: 185873 - DNA, 17 bp, synthetic construct
  source 1..17: mol_type = other DNA
gaacgttctcagacagc

SEQ ID NO: 185874 - DNA, 17 bp, synthetic construct
  source 1..17: mol_type = other DNA
agaacgttctcagacag

SEQ ID NO: 185875 - DNA, 17 bp, synthetic construct
  source 1..17: mol_type = other DNA
cagaacgttctcagaca

SEQ ID NO: 185876 - DNA, 17 bp, synthetic construct
  source 1..17: mol_type = other DNA
gcagaacgttctcagac

SEQ ID NO: 185877 - DNA, 17 bp, synthetic construct
  source 1..17: mol_type = other DNA
ggcagaacgttctcaga

SEQ ID NO: 185878 - DNA, 17 bp, synthetic construct
  source 1..17: mol_type = other DNA
aggcagaacgttctcag

SEQ ID NO: 185879 - DNA, 17 bp, synthetic construct
  source 1..17: mol_type = other DNA
gaggcagaacgttctca

SEQ ID NO: 185880 - DNA, 17 bp, synthetic construct
  source 1..17: mol_type = other DNA
ggaggcagaacgttctc

SEQ ID NO: 185881 - DNA, 17 bp, synthetic construct
  source 1..17: mol_type = other DNA
tggaggcagaacgttct

SEQ ID NO: 185882 - DNA, 17 bp, synthetic construct
  source 1..17: mol_type = other DNA
atggaggcagaacgttc

SEQ ID NO: 185883 - DNA, 17 bp, synthetic construct
  source 1..17: mol_type = other DNA
gatggaggcagaacgtt

SEQ ID NO: 185884 - DNA, 17 bp, synthetic construct
  source 1..17: mol_type = other DNA
ggatggaggcagaacgt

SEQ ID NO: 185885 - DNA, 17 bp, synthetic construct
  source 1..17: mol_type = other DNA
gggatggaggcagaacg

SEQ ID NO: 185886 - DNA, 17 bp, synthetic construct
  source 1..17: mol_type = other DNA
ggggatggaggcagaac

SEQ ID NO: 185887 - DNA, 17 bp, synthetic construct
  source 1..17: mol_type = other DNA
tggggatggaggcagaa

SEQ ID NO: 185888 - DNA, 17 bp, synthetic construct
  source 1..17: mol_type = other DNA
atggggatggaggcaga

SEQ ID NO: 185889 - DNA, 17 bp, synthetic construct
  source 1..17: mol_type = other DNA
catggggatggaggcag

SEQ ID NO: 185890 - DNA, 17 bp, synthetic construct
  source 1..17: mol_type = other DNA
gcatggggatggaggca

SEQ ID NO: 185891 - DNA, 17 bp, synthetic construct
  source 1..17: mol_type = other DNA
agcatggggatggaggc

SEQ ID NO: 185892 - DNA, 17 bp, synthetic construct
  source 1..17: mol_type = other DNA
gagcatggggatggagg

SEQ ID NO: 185893 - DNA, 17 bp, synthetic construct
  source 1..17: mol_type = other DNA
agagcatggggatggag

SEQ ID NO: 185894 - DNA, 17 bp, synthetic construct
  source 1..17: mol_type = other DNA
cagagcatggggatgga

SEQ ID NO: 185895 - DNA, 17 bp, synthetic construct
  source 1..17: mol_type = other DNA
acagagcatggggatgg

SEQ ID NO: 185896 - DNA, 17 bp, synthetic construct
  source 1..17: mol_type = other DNA
gacagagcatggggatg

SEQ ID NO: 185897 - DNA, 17 bp, synthetic construct
  source 1..17: mol_type = other DNA
ggacagagcatggggat

SEQ ID NO: 185898 - DNA, 17 bp, synthetic construct
  source 1..17: mol_type = other DNA
tggacagagcatgggga

SEQ ID NO: 185899 - DNA, 17 bp, synthetic construct
  source 1..17: mol_type = other DNA
gtggacagagcatgggg

SEQ ID NO: 185900 - DNA, 17 bp, synthetic construct
  source 1..17: mol_type = other DNA
ggtggacagagcatggg

SEQ ID NO: 185901 - DNA, 17 bp, synthetic construct
  source 1..17: mol_type = other DNA
aggtggacagagcatgg

SEQ ID NO: 185902 - DNA, 17 bp, synthetic construct
  source 1..17: mol_type = other DNA
caggtggacagagcatg

SEQ ID NO: 185903 - DNA, 17 bp, synthetic construct
  source 1..17: mol_type = other DNA
ccaggtggacagagcat

SEQ ID NO: 185904 - DNA, 17 bp, synthetic construct
  source 1..17: mol_type = other DNA
tccaggtggacagagca

SEQ ID NO: 185905 - DNA, 17 bp, synthetic construct
  source 1..17: mol_type = other DNA
ctccaggtggacagagc

SEQ ID NO: 185906 - DNA, 17 bp, synthetic construct
  source 1..17: mol_type = other DNA
gctccaggtggacagag

SEQ ID NO: 185907 - DNA, 17 bp, synthetic construct
  source 1..17: mol_type = other DNA
ggctccaggtggacaga

SEQ ID NO: 185908 - DNA, 17 bp, synthetic construct
  source 1..17: mol_type = other DNA
tggctccaggtggacag

SEQ ID NO: 185909 - DNA, 17 bp, synthetic construct
  source 1..17: mol_type = other DNA
ctggctccaggtggaca

SEQ ID NO: 185910 - DNA, 17 bp, synthetic construct
  source 1..17: mol_type = other DNA
cctggctccaggtggac

SEQ ID NO: 185911 - DNA, 17 bp, synthetic construct
  source 1..17: mol_type = other DNA
tcctggctccaggtgga

SEQ ID NO: 185912 - DNA, 17 bp, synthetic construct
  source 1..17: mol_type = other DNA
atcctggctccaggtgg

SEQ ID NO: 185913 - DNA, 17 bp, synthetic construct
  source 1..17: mol_type = other DNA
catcctggctccaggtg

SEQ ID NO: 185914 - DNA, 17 bp, synthetic construct
  source 1..17: mol_type = other DNA
acatcctggctccaggt

SEQ ID NO: 185915 - DNA, 17 bp, synthetic construct
  source 1..17: mol_type = other DNA
cacatcctggctccagg

SEQ ID NO: 185916 - DNA, 17 bp, synthetic construct
  source 1..17: mol_type = other DNA
gcacatcctggctccag

SEQ ID NO: 185917 - DNA, 17 bp, synthetic construct
  source 1..17: mol_type = other DNA
tgcacatcctggctcca

SEQ ID NO: 185918 - DNA, 17 bp, synthetic construct
  source 1..17: mol_type = other DNA
atgcacatcctggctcc

SEQ ID NO: 185919 - DNA, 17 bp, synthetic construct
  source 1..17: mol_type = other DNA
aatgcacatcctggctc

SEQ ID NO: 185920 - DNA, 17 bp, synthetic construct
  source 1..17: mol_type = other DNA
caatgcacatcctggct

SEQ ID NO: 185921 - DNA, 17 bp, synthetic construct
  source 1..17: mol_type = other DNA
acaatgcacatcctggc

SEQ ID NO: 185922 - DNA, 17 bp, synthetic construct
  source 1..17: mol_type = other DNA
gacaatgcacatcctgg

SEQ ID NO: 185923 - DNA, 17 bp, synthetic construct
  source 1..17: mol_type = other DNA
agacaatgcacatcctg

SEQ ID NO: 185924 - DNA, 17 bp, synthetic construct
  source 1..17: mol_type = other DNA
cagacaatgcacatcct

SEQ ID NO: 185925 - DNA, 17 bp, synthetic construct
  source 1..17: mol_type = other DNA
tcagacaatgcacatcc

SEQ ID NO: 185926 - DNA, 17 bp, synthetic construct
  source 1..17: mol_type = other DNA
atcagacaatgcacatc

SEQ ID NO: 185927 - DNA, 17 bp, synthetic construct
  source 1..17: mol_type = other DNA
gatcagacaatgcacat

SEQ ID NO: 185928 - DNA, 17 bp, synthetic construct
  source 1..17: mol_type = other DNA
tgatcagacaatgcaca

SEQ ID NO: 185929 - DNA, 17 bp, synthetic construct
  source 1..17: mol_type = other DNA
atgatcagacaatgcac

SEQ ID NO: 185930 - DNA, 17 bp, synthetic construct
  source 1..17: mol_type = other DNA
catgatcagacaatgca

SEQ ID NO: 185931 - DNA, 17 bp, synthetic construct
  source 1..17: mol_type = other DNA
tcatgatcagacaatgc

SEQ ID NO: 185932 - DNA, 17 bp, synthetic construct
  source 1..17: mol_type = other DNA
ttcatgatcagacaatg

SEQ ID NO: 185933 - DNA, 17 bp, synthetic construct
  source 1..17: mol_type = other DNA
tttcatgatcagacaat

SEQ ID NO: 185934 - DNA, 17 bp, synthetic construct
  source 1..17: mol_type = other DNA
ttttcatgatcagacaa

SEQ ID NO: 185935 - DNA, 17 bp, synthetic construct
  source 1..17: mol_type = other DNA
gttttcatgatcagaca

SEQ ID NO: 185936 - DNA, 17 bp, synthetic construct
  source 1..17: mol_type = other DNA
ggttttcatgatcagac

SEQ ID NO: 185937 - DNA, 17 bp, synthetic construct
  source 1..17: mol_type = other DNA
aggttttcatgatcaga

SEQ ID NO: 185938 - DNA, 17 bp, synthetic construct
  source 1..17: mol_type = other DNA
aaggttttcatgatcag

SEQ ID NO: 185939 - DNA, 17 bp, synthetic construct
  source 1..17: mol_type = other DNA
caaggttttcatgatca

SEQ ID NO: 185940 - DNA, 17 bp, synthetic construct
  source 1..17: mol_type = other DNA
ccaaggttttcatgatc

SEQ ID NO: 185941 - DNA, 17 bp, synthetic construct
  source 1..17: mol_type = other DNA
cccaaggttttcatgat

SEQ ID NO: 185942 - DNA, 17 bp, synthetic construct
  source 1..17: mol_type = other DNA
gcccaaggttttcatga

SEQ ID NO: 185943 - DNA, 17 bp, synthetic construct
  source 1..17: mol_type = other DNA
ggcccaaggttttcatg

SEQ ID NO: 185944 - DNA, 17 bp, synthetic construct
  source 1..17: mol_type = other DNA
aggcccaaggttttcat

SEQ ID NO: 185945 - DNA, 17 bp, synthetic construct
  source 1..17: mol_type = other DNA
gaggcccaaggttttca

SEQ ID NO: 185946 - DNA, 17 bp, synthetic construct
  source 1..17: mol_type = other DNA
ggaggcccaaggttttc

SEQ ID NO: 185947 - DNA, 17 bp, synthetic construct
  source 1..17: mol_type = other DNA
aggaggcccaaggtttt

SEQ ID NO: 185948 - DNA, 17 bp, synthetic construct
  source 1..17: mol_type = other DNA
gaggaggcccaaggttt

SEQ ID NO: 185949 - DNA, 17 bp, synthetic construct
  source 1..17: mol_type = other DNA
agaggaggcccaaggtt

SEQ ID NO: 185950 - DNA, 17 bp, synthetic construct
  source 1..17: mol_type = other DNA
cagaggaggcccaaggt

SEQ ID NO: 185951 - DNA, 17 bp, synthetic construct
  source 1..17: mol_type = other DNA
gcagaggaggcccaagg

SEQ ID NO: 185952 - DNA, 17 bp, synthetic construct
  source 1..17: mol_type = other DNA
cgcagaggaggcccaag

SEQ ID NO: 185953 - DNA, 17 bp, synthetic construct
  source 1..17: mol_type = other DNA
ccgcagaggaggcccaa

SEQ ID NO: 185954 - DNA, 17 bp, synthetic construct
  source 1..17: mol_type = other DNA
tccgcagaggaggccca

SEQ ID NO: 185955 - DNA, 17 bp, synthetic construct
  source 1..17: mol_type = other DNA
ctccgcagaggaggccc

SEQ ID NO: 185956 - DNA, 17 bp, synthetic construct
  source 1..17: mol_type = other DNA
gctccgcagaggaggcc

SEQ ID NO: 185957 - DNA, 17 bp, synthetic construct
  source 1..17: mol_type = other DNA
ggctccgcagaggaggc

SEQ ID NO: 185958 - DNA, 17 bp, synthetic construct
  source 1..17: mol_type = other DNA
gggctccgcagaggagg

SEQ ID NO: 185959 - DNA, 17 bp, synthetic construct
  source 1..17: mol_type = other DNA
ggggctccgcagaggag

SEQ ID NO: 185960 - DNA, 17 bp, synthetic construct
  source 1..17: mol_type = other DNA
gggggctccgcagagga

SEQ ID NO: 185961 - DNA, 17 bp, synthetic construct
  source 1..17: mol_type = other DNA
ggggggctccgcagagg

SEQ ID NO: 185962 - DNA, 17 bp, synthetic construct
  source 1..17: mol_type = other DNA
cggggggctccgcagag

SEQ ID NO: 185963 - DNA, 17 bp, synthetic construct
  source 1..17: mol_type = other DNA
ccggggggctccgcaga

SEQ ID NO: 185964 - DNA, 17 bp, synthetic construct
  source 1..17: mol_type = other DNA
gccggggggctccgcag

SEQ ID NO: 185965 - DNA, 17 bp, synthetic construct
  source 1..17: mol_type = other DNA
ggccggggggctccgca

SEQ ID NO: 185966 - DNA, 17 bp, synthetic construct
  source 1..17: mol_type = other DNA
aggccggggggctccgc

SEQ ID NO: 185967 - DNA, 17 bp, synthetic construct
  source 1..17: mol_type = other DNA
caggccggggggctccg

SEQ ID NO: 185968 - DNA, 17 bp, synthetic construct
  source 1..17: mol_type = other DNA
acaggccggggggctcc

SEQ ID NO: 185969 - DNA, 17 bp, synthetic construct
  source 1..17: mol_type = other DNA
cacaggccggggggctc

SEQ ID NO: 185970 - DNA, 17 bp, synthetic construct
  source 1..17: mol_type = other DNA
acacaggccggggggct

SEQ ID NO: 185971 - DNA, 17 bp, synthetic construct
  source 1..17: mol_type = other DNA
cacacaggccggggggc

SEQ ID NO: 185972 - DNA, 17 bp, synthetic construct
  source 1..17: mol_type = other DNA
acacacaggccgggggg

SEQ ID NO: 185973 - DNA, 17 bp, synthetic construct
  source 1..17: mol_type = other DNA
cacacacaggccggggg

SEQ ID NO: 185974 - DNA, 17 bp, synthetic construct
  source 1..17: mol_type = other DNA
ccacacacaggccgggg

SEQ ID NO: 185975 - DNA, 17 bp, synthetic construct
  source 1..17: mol_type = other DNA
gccacacacaggccggg

SEQ ID NO: 185976 - DNA, 17 bp, synthetic construct
  source 1..17: mol_type = other DNA
tgccacacacaggccgg

SEQ ID NO: 185977 - DNA, 17 bp, synthetic construct
  source 1..17: mol_type = other DNA
gtgccacacacaggccg

SEQ ID NO: 185978 - DNA, 17 bp, synthetic construct
  source 1..17: mol_type = other DNA
ggtgccacacacaggcc

SEQ ID NO: 185979 - DNA, 17 bp, synthetic construct
  source 1..17: mol_type = other DNA
gggtgccacacacaggc

SEQ ID NO: 185980 - DNA, 17 bp, synthetic construct
  source 1..17: mol_type = other DNA
ggggtgccacacacagg

SEQ ID NO: 185981 - DNA, 17 bp, synthetic construct
  source 1..17: mol_type = other DNA
cggggtgccacacacag

SEQ ID NO: 185982 - DNA, 17 bp, synthetic construct
  source 1..17: mol_type = other DNA
gcggggtgccacacaca

SEQ ID NO: 185983 - DNA, 17 bp, synthetic construct
  source 1..17: mol_type = other DNA
cgcggggtgccacacac

SEQ ID NO: 185984 - DNA, 17 bp, synthetic construct
  source 1..17: mol_type = other DNA
gcgcggggtgccacaca

SEQ ID NO: 185985 - DNA, 17 bp, synthetic construct
  source 1..17: mol_type = other DNA
agcgcggggtgccacac

SEQ ID NO: 185986 - DNA, 17 bp, synthetic construct
  source 1..17: mol_type = other DNA
gagcgcggggtgccaca

SEQ ID NO: 185987 - DNA, 17 bp, synthetic construct
  source 1..17: mol_type = other DNA
ggagcgcggggtgccac

SEQ ID NO: 185988 - DNA, 17 bp, synthetic construct
  source 1..17: mol_type = other DNA
cggagcgcggggtgcca

SEQ ID NO: 185989 - DNA, 17 bp, synthetic construct
  source 1..17: mol_type = other DNA
acggagcgcggggtgcc

SEQ ID NO: 185990 - DNA, 17 bp, synthetic construct
  source 1..17: mol_type = other DNA
cacggagcgcggggtgc

SEQ ID NO: 185991 - DNA, 17 bp, synthetic construct
  source 1..17: mol_type = other DNA
gcacggagcgcggggtg

SEQ ID NO: 185992 - DNA, 17 bp, synthetic construct
  source 1..17: mol_type = other DNA
agcacggagcgcggggt

SEQ ID NO: 185993 - DNA, 17 bp, synthetic construct
  source 1..17: mol_type = other DNA
gagcacggagcgcgggg

SEQ ID NO: 185994 - DNA, 17 bp, synthetic construct
  source 1..17: mol_type = other DNA
ggagcacggagcgcggg

SEQ ID NO: 185995 - DNA, 17 bp, synthetic construct
  source 1..17: mol_type = other DNA
aggagcacggagcgcgg

SEQ ID NO: 185996 - DNA, 17 bp, synthetic construct
  source 1..17: mol_type = other DNA
caggagcacggagcgcg

SEQ ID NO: 185997 - DNA, 17 bp, synthetic construct
  source 1..17: mol_type = other DNA
gcaggagcacggagcgc

SEQ ID NO: 185998 - DNA, 17 bp, synthetic construct
  source 1..17: mol_type = other DNA
agcaggagcacggagcg

SEQ ID NO: 185999 - DNA, 17 bp, synthetic construct
  source 1..17: mol_type = other DNA
cagcaggagcacggagc

SEQ ID NO: 186000 - DNA, 17 bp, synthetic construct
  source 1..17: mol_type = other DNA
gcagcaggagcacggag

SEQ ID NO: 186001 - DNA, 17 bp, synthetic construct
  source 1..17: mol_type = other DNA
ggcagcaggagcacgga

SEQ ID NO: 186002 - DNA, 17 bp, synthetic construct
  source 1..17: mol_type = other DNA
gggcagcaggagcacgg

SEQ ID NO: 186003 - DNA, 17 bp, synthetic construct
  source 1..17: mol_type = other DNA
tgggcagcaggagcacg

SEQ ID NO: 186004 - DNA, 17 bp, synthetic construct
  source 1..17: mol_type = other DNA
gtgggcagcaggagcac

SEQ ID NO: 186005 - DNA, 17 bp, synthetic construct
  source 1..17: mol_type = other DNA
ggtgggcagcaggagca

SEQ ID NO: 186006 - DNA, 17 bp, synthetic construct
  source 1..17: mol_type = other DNA
gggtgggcagcaggagc

SEQ ID NO: 186007 - DNA, 17 bp, synthetic construct
  source 1..17: mol_type = other DNA
ggggtgggcagcaggag

SEQ ID NO: 186008 - DNA, 17 bp, synthetic construct
  source 1..17: mol_type = other DNA
cggggtgggcagcagga

SEQ ID NO: 186009 - DNA, 17 bp, synthetic construct
  source 1..17: mol_type = other DNA
acggggtgggcagcagg

SEQ ID NO: 186010 - DNA, 17 bp, synthetic construct
  source 1..17: mol_type = other DNA
cacggggtgggcagcag

SEQ ID NO: 186011 - DNA, 17 bp, synthetic construct
  source 1..17: mol_type = other DNA
ccacggggtgggcagca

SEQ ID NO: 186012 - DNA, 17 bp, synthetic construct
  source 1..17: mol_type = other DNA
cccacggggtgggcagc

SEQ ID NO: 186013 - DNA, 17 bp, synthetic construct
  source 1..17: mol_type = other DNA
acccacggggtgggcag

SEQ ID NO: 186014 - DNA, 17 bp, synthetic construct
  source 1..17: mol_type = other DNA
cacccacggggtgggca

SEQ ID NO: 186015 - DNA, 17 bp, synthetic construct
  source 1..17: mol_type = other DNA
tcacccacggggtgggc

SEQ ID NO: 186016 - DNA, 17 bp, synthetic construct
  source 1..17: mol_type = other DNA
ttcacccacggggtggg

SEQ ID NO: 186017 - DNA, 17 bp, synthetic construct
  source 1..17: mol_type = other DNA
tttcacccacggggtgg

SEQ ID NO: 186018 - DNA, 17 bp, synthetic construct
  source 1..17: mol_type = other DNA
gtttcacccacggggtg

SEQ ID NO: 186019 - DNA, 17 bp, synthetic construct
  source 1..17: mol_type = other DNA
ggtttcacccacggggt

SEQ ID NO: 186020 - DNA, 17 bp, synthetic construct
  source 1..17: mol_type = other DNA
cggtttcacccacgggg

SEQ ID NO: 186021 - DNA, 17 bp, synthetic construct
  source 1..17: mol_type = other DNA
ccggtttcacccacggg

SEQ ID NO: 186022 - DNA, 17 bp, synthetic construct
  source 1..17: mol_type = other DNA
gccggtttcacccacgg

SEQ ID NO: 186023 - DNA, 17 bp, synthetic construct
  source 1..17: mol_type = other DNA
ggccggtttcacccacg

SEQ ID NO: 186024 - DNA, 17 bp, synthetic construct
  source 1..17: mol_type = other DNA
gggccggtttcacccac

SEQ ID NO: 186025 - DNA, 17 bp, synthetic construct
  source 1..17: mol_type = other DNA
ggggccggtttcaccca

SEQ ID NO: 186026 - DNA, 17 bp, synthetic construct
  source 1..17: mol_type = other DNA
tggggccggtttcaccc

SEQ ID NO: 186027 - DNA, 17 bp, synthetic construct
  source 1..17: mol_type = other DNA
ctggggccggtttcacc

SEQ ID NO: 186028 - DNA, 17 bp, synthetic construct
  source 1..17: mol_type = other DNA
tctggggccggtttcac

SEQ ID NO: 186029 - DNA, 17 bp, synthetic construct
  source 1..17: mol_type = other DNA
ttctggggccggtttca

SEQ ID NO: 186030 - DNA, 17 bp, synthetic construct
  source 1..17: mol_type = other DNA
cttctggggccggtttc

SEQ ID NO: 186031 - DNA, 17 bp, synthetic construct
  source 1..17: mol_type = other DNA
ccttctggggccggttt

SEQ ID NO: 186032 - DNA, 17 bp, synthetic construct
  source 1..17: mol_type = other DNA
cccttctggggccggtt

SEQ ID NO: 186033 - DNA, 17 bp, synthetic construct
  source 1..17: mol_type = other DNA
acccttctggggccggt

SEQ ID NO: 186034 - DNA, 17 bp, synthetic construct
  source 1..17: mol_type = other DNA
cacccttctggggccgg

SEQ ID NO: 186035 - DNA, 17 bp, synthetic construct
  source 1..17: mol_type = other DNA
tcacccttctggggccg

SEQ ID NO: 186036 - DNA, 17 bp, synthetic construct
  source 1..17: mol_type = other DNA
ctcacccttctggggcc

SEQ ID NO: 186037 - DNA, 17 bp, synthetic construct
  source 1..17: mol_type = other DNA
cctcacccttctggggc

SEQ ID NO: 186038 - DNA, 17 bp, synthetic construct
  source 1..17: mol_type = other DNA
ccctcacccttctgggg

SEQ ID NO: 186039 - DNA, 17 bp, synthetic construct
  source 1..17: mol_type = other DNA
cccctcacccttctggg

SEQ ID NO: 186040 - DNA, 17 bp, synthetic construct
  source 1..17: mol_type = other DNA
gcccctcacccttctgg

SEQ ID NO: 186041 - DNA, 17 bp, synthetic construct
  source 1..17: mol_type = other DNA
ggcccctcacccttctg

SEQ ID NO: 186042 - DNA, 17 bp, synthetic construct
  source 1..17: mol_type = other DNA
tggcccctcacccttct

SEQ ID NO: 186043 - DNA, 17 bp, synthetic construct
  source 1..17: mol_type = other DNA
ctggcccctcacccttc

SEQ ID NO: 186044 - DNA, 17 bp, synthetic construct
  source 1..17: mol_type = other DNA
gctggcccctcaccctt

SEQ ID NO: 186045 - DNA, 17 bp, synthetic construct
  source 1..17: mol_type = other DNA
tgctggcccctcaccct

SEQ ID NO: 186046 - DNA, 17 bp, synthetic construct
  source 1..17: mol_type = other DNA
ctgctggcccctcaccc

SEQ ID NO: 186047 - DNA, 17 bp, synthetic construct
  source 1..17: mol_type = other DNA
cctgctggcccctcacc

SEQ ID NO: 186048 - DNA, 17 bp, synthetic construct
  source 1..17: mol_type = other DNA
tcctgctggcccctcac

SEQ ID NO: 186049 - DNA, 17 bp, synthetic construct
  source 1..17: mol_type = other DNA
gtcctgctggcccctca

SEQ ID NO: 186050 - DNA, 17 bp, synthetic construct
  source 1..17: mol_type = other DNA
ggtcctgctggcccctc

SEQ ID NO: 186051 - DNA, 17 bp, synthetic construct
  source 1..17: mol_type = other DNA
gggtcctgctggcccct

SEQ ID NO: 186052 - DNA, 17 bp, synthetic construct
  source 1..17: mol_type = other DNA
ggggtcctgctggcccc

SEQ ID NO: 186053 - DNA, 17 bp, synthetic construct
  source 1..17: mol_type = other DNA
aggggtcctgctggccc

SEQ ID NO: 186054 - DNA, 17 bp, synthetic construct
  source 1..17: mol_type = other DNA
aaggggtcctgctggcc

SEQ ID NO: 186055 - DNA, 17 bp, synthetic construct
  source 1..17: mol_type = other DNA
aaaggggtcctgctggc

SEQ ID NO: 186056 - DNA, 17 bp, synthetic construct
  source 1..17: mol_type = other DNA
gaaaggggtcctgctgg

SEQ ID NO: 186057 - DNA, 17 bp, synthetic construct
  source 1..17: mol_type = other DNA
cgaaaggggtcctgctg

SEQ ID NO: 186058 - DNA, 17 bp, synthetic construct
  source 1..17: mol_type = other DNA
ccgaaaggggtcctgct

SEQ ID NO: 186059 - DNA, 17 bp, synthetic construct
  source 1..17: mol_type = other DNA
cccgaaaggggtcctgc

SEQ ID NO: 186060 - DNA, 17 bp, synthetic construct
  source 1..17: mol_type = other DNA
tcccgaaaggggtcctg

SEQ ID NO: 186061 - DNA, 17 bp, synthetic construct
  source 1..17: mol_type = other DNA
ctcccgaaaggggtcct

SEQ ID NO: 186062 - DNA, 17 bp, synthetic construct
  source 1..17: mol_type = other DNA
cctcccgaaaggggtcc

SEQ ID NO: 186063 - DNA, 17 bp, synthetic construct
  source 1..17: mol_type = other DNA
ccctcccgaaaggggtc

SEQ ID NO: 186064 - DNA, 17 bp, synthetic construct
  source 1..17: mol_type = other DNA
gccctcccgaaaggggt

SEQ ID NO: 186065 - DNA, 17 bp, synthetic construct
  source 1..17: mol_type = other DNA
cgccctcccgaaagggg

SEQ ID NO: 186066 - DNA, 17 bp, synthetic construct
  source 1..17: mol_type = other DNA
gcgccctcccgaaaggg

SEQ ID NO: 186067 - DNA, 17 bp, synthetic construct
  source 1..17: mol_type = other DNA
ggcgccctcccgaaagg

SEQ ID NO: 186068 - DNA, 17 bp, synthetic construct
  source 1..17: mol_type = other DNA
tggcgccctcccgaaag

SEQ ID NO: 186069 - DNA, 17 bp, synthetic construct
  source 1..17: mol_type = other DNA
gtggcgccctcccgaaa

SEQ ID NO: 186070 - DNA, 17 bp, synthetic construct
  source 1..17: mol_type = other DNA
agtggcgccctcccgaa

SEQ ID NO: 186071 - DNA, 17 bp, synthetic construct
  source 1..17: mol_type = other DNA
gagtggcgccctcccga

SEQ ID NO: 186072 - DNA, 17 bp, synthetic construct
  source 1..17: mol_type = other DNA
tgagtggcgccctcccg

SEQ ID NO: 186073 - DNA, 17 bp, synthetic construct
  source 1..17: mol_type = other DNA
ctgagtggcgccctccc

SEQ ID NO: 186074 - DNA, 17 bp, synthetic construct
  source 1..17: mol_type = other DNA
cctgagtggcgccctcc

SEQ ID NO: 186075 - DNA, 17 bp, synthetic construct
  source 1..17: mol_type = other DNA
tcctgagtggcgccctc

SEQ ID NO: 186076 - DNA, 17 bp, synthetic construct
  source 1..17: mol_type = other DNA
ctcctgagtggcgccct

SEQ ID NO: 186077 - DNA, 17 bp, synthetic construct
  source 1..17: mol_type = other DNA
actcctgagtggcgccc

SEQ ID NO: 186078 - DNA, 17 bp, synthetic construct
  source 1..17: mol_type = other DNA
gactcctgagtggcgcc

SEQ ID NO: 186079 - DNA, 17 bp, synthetic construct
  source 1..17: mol_type = other DNA
ggactcctgagtggcgc

SEQ ID NO: 186080 - DNA, 17 bp, synthetic construct
  source 1..17: mol_type = other DNA
aggactcctgagtggcg

SEQ ID NO: 186081 - DNA, 17 bp, synthetic construct
  source 1..17: mol_type = other DNA
taggactcctgagtggc

SEQ ID NO: 186082 - DNA, 17 bp, synthetic construct
  source 1..17: mol_type = other DNA
gtaggactcctgagtgg

SEQ ID NO: 186083 - DNA, 17 bp, synthetic construct
  source 1..17: mol_type = other DNA
ggtaggactcctgagtg

SEQ ID NO: 186084 - DNA, 17 bp, synthetic construct
  source 1..17: mol_type = other DNA
gggtaggactcctgagt

SEQ ID NO: 186085 - DNA, 17 bp, synthetic construct
  source 1..17: mol_type = other DNA
agggtaggactcctgag

SEQ ID NO: 186086 - DNA, 17 bp, synthetic construct
  source 1..17: mol_type = other DNA
cagggtaggactcctga

SEQ ID NO: 186087 - DNA, 17 bp, synthetic construct
  source 1..17: mol_type = other DNA
ccagggtaggactcctg

SEQ ID NO: 186088 - DNA, 17 bp, synthetic construct
  source 1..17: mol_type = other DNA
cccagggtaggactcct

SEQ ID NO: 186089 - DNA, 17 bp, synthetic construct
  source 1..17: mol_type = other DNA
tcccagggtaggactcc

SEQ ID NO: 186090 - DNA, 17 bp, synthetic construct
  source 1..17: mol_type = other DNA
ctcccagggtaggactc

SEQ ID NO: 186091 - DNA, 17 bp, synthetic construct
  source 1..17: mol_type = other DNA
tctcccagggtaggact

SEQ ID NO: 186092 - DNA, 17 bp, synthetic construct
  source 1..17: mol_type = other DNA
ctctcccagggtaggac

SEQ ID NO: 186093 - DNA, 17 bp, synthetic construct
  source 1..17: mol_type = other DNA
gctctcccagggtagga

SEQ ID NO: 186094 - DNA, 17 bp, synthetic construct
  source 1..17: mol_type = other DNA
ggctctcccagggtagg

SEQ ID NO: 186095 - DNA, 17 bp, synthetic construct
  source 1..17: mol_type = other DNA
aggctctcccagggtag

SEQ ID NO: 186096 - DNA, 17 bp, synthetic construct
  source 1..17: mol_type = other DNA
caggctctcccagggta

SEQ ID NO: 186097 - DNA, 17 bp, synthetic construct
  source 1..17: mol_type = other DNA
acaggctctcccagggt

SEQ ID NO: 186098 - DNA, 17 bp, synthetic construct
  source 1..17: mol_type = other DNA
cacaggctctcccaggg

SEQ ID NO: 186099 - DNA, 17 bp, synthetic construct
  source 1..17: mol_type = other DNA
ccacaggctctcccagg

SEQ ID NO: 186100 - DNA, 17 bp, synthetic construct
  source 1..17: mol_type = other DNA
gccacaggctctcccag

SEQ ID NO: 186101 - DNA, 17 bp, synthetic construct
  source 1..17: mol_type = other DNA
ggccacaggctctccca

SEQ ID NO: 186102 - DNA, 17 bp, synthetic construct
  source 1..17: mol_type = other DNA
gggccacaggctctccc

SEQ ID NO: 186103 - DNA, 17 bp, synthetic construct
  source 1..17: mol_type = other DNA
tgggccacaggctctcc

SEQ ID NO: 186104 - DNA, 17 bp, synthetic construct
  source 1..17: mol_type = other DNA
gtgggccacaggctctc

SEQ ID NO: 186105 - DNA, 17 bp, synthetic construct
  source 1..17: mol_type = other DNA
ggtgggccacaggctct

SEQ ID NO: 186106 - DNA, 17 bp, synthetic construct
  source 1..17: mol_type = other DNA
aggtgggccacaggctc

SEQ ID NO: 186107 - DNA, 17 bp, synthetic construct
  source 1..17: mol_type = other DNA
aaggtgggccacaggct

SEQ ID NO: 186108 - DNA, 17 bp, synthetic construct
  source 1..17: mol_type = other DNA
caaggtgggccacaggc

SEQ ID NO: 186109 - DNA, 17 bp, synthetic construct
  source 1..17: mol_type = other DNA
ccaaggtgggccacagg

SEQ ID NO: 186110 - DNA, 17 bp, synthetic construct
  source 1..17: mol_type = other DNA
gccaaggtgggccacag

SEQ ID NO: 186111 - DNA, 17 bp, synthetic construct
  source 1..17: mol_type = other DNA
ggccaaggtgggccaca

SEQ ID NO: 186112 - DNA, 17 bp, synthetic construct
  source 1..17: mol_type = other DNA
aggccaaggtgggccac

SEQ ID NO: 186113 - DNA, 17 bp, synthetic construct
  source 1..17: mol_type = other DNA
aaggccaaggtgggcca

SEQ ID NO: 186114 - DNA, 17 bp, synthetic construct
  source 1..17: mol_type = other DNA
caaggccaaggtgggcc

SEQ ID NO: 186115 - DNA, 17 bp, synthetic construct
  source 1..17: mol_type = other DNA
gcaaggccaaggtgggc

SEQ ID NO: 186116 - DNA, 17 bp, synthetic construct
  source 1..17: mol_type = other DNA
ggcaaggccaaggtggg

SEQ ID NO: 186117 - DNA, 17 bp, synthetic construct
  source 1..17: mol_type = other DNA
gggcaaggccaaggtgg

SEQ ID NO: 186118 - DNA, 17 bp, synthetic construct
  source 1..17: mol_type = other DNA
ggggcaaggccaaggtg

SEQ ID NO: 186119 - DNA, 17 bp, synthetic construct
  source 1..17: mol_type = other DNA
aggggcaaggccaaggt

SEQ ID NO: 186120 - DNA, 17 bp, synthetic construct
  source 1..17: mol_type = other DNA
gaggggcaaggccaagg

SEQ ID NO: 186121 - DNA, 17 bp, synthetic construct
  source 1..17: mol_type = other DNA
ggaggggcaaggccaag

SEQ ID NO: 186122 - DNA, 17 bp, synthetic construct
  source 1..17: mol_type = other DNA
gggaggggcaaggccaa

SEQ ID NO: 186123 - DNA, 17 bp, synthetic construct
  source 1..17: mol_type = other DNA
agggaggggcaaggcca

SEQ ID NO: 186124 - DNA, 17 bp, synthetic construct
  source 1..17: mol_type = other DNA
cagggaggggcaaggcc

SEQ ID NO: 186125 - DNA, 17 bp, synthetic construct
  source 1..17: mol_type = other DNA
tcagggaggggcaaggc

SEQ ID NO: 186126 - DNA, 17 bp, synthetic construct
  source 1..17: mol_type = other DNA
atcagggaggggcaagg

SEQ ID NO: 186127 - DNA, 17 bp, synthetic construct
  source 1..17: mol_type = other DNA
catcagggaggggcaag

SEQ ID NO: 186128 - DNA, 17 bp, synthetic construct
  source 1..17: mol_type = other DNA
acatcagggaggggcaa

SEQ ID NO: 186129 - DNA, 17 bp, synthetic construct
  source 1..17: mol_type = other DNA
gacatcagggaggggca

SEQ ID NO: 186130 - DNA, 17 bp, synthetic construct
  source 1..17: mol_type = other DNA
tgacatcagggaggggc

SEQ ID NO: 186131 - DNA, 17 bp, synthetic construct
  source 1..17: mol_type = other DNA
gtgacatcagggagggg

SEQ ID NO: 186132 - DNA, 17 bp, synthetic construct
  source 1..17: mol_type = other DNA
agtgacatcagggaggg

SEQ ID NO: 186133 - DNA, 17 bp, synthetic construct
  source 1..17: mol_type = other DNA
cagtgacatcagggagg

SEQ ID NO: 186134 - DNA, 17 bp, synthetic construct
  source 1..17: mol_type = other DNA
ccagtgacatcagggag

SEQ ID NO: 186135 - DNA, 17 bp, synthetic construct
  source 1..17: mol_type = other DNA
cccagtgacatcaggga

SEQ ID NO: 186136 - DNA, 17 bp, synthetic construct
  source 1..17: mol_type = other DNA
tcccagtgacatcaggg

SEQ ID NO: 186137 - DNA, 17 bp, synthetic construct
  source 1..17: mol_type = other DNA
gtcccagtgacatcagg

SEQ ID NO: 186138 - DNA, 17 bp, synthetic construct
  source 1..17: mol_type = other DNA
cgtcccagtgacatcag

SEQ ID NO: 186139 - DNA, 17 bp, synthetic construct
  source 1..17: mol_type = other DNA
gcgtcccagtgacatca

SEQ ID NO: 186140 - DNA, 17 bp, synthetic construct
  source 1..17: mol_type = other DNA
ggcgtcccagtgacatc

SEQ ID NO: 186141 - DNA, 17 bp, synthetic construct
  source 1..17: mol_type = other DNA
gggcgtcccagtgacat

SEQ ID NO: 186142 - DNA, 17 bp, synthetic construct
  source 1..17: mol_type = other DNA
agggcgtcccagtgaca

SEQ ID NO: 186143 - DNA, 17 bp, synthetic construct
  source 1..17: mol_type = other DNA
cagggcgtcccagtgac

SEQ ID NO: 186144 - DNA, 17 bp, synthetic construct
  source 1..17: mol_type = other DNA
ccagggcgtcccagtga

SEQ ID NO: 186145 - DNA, 17 bp, synthetic construct
  source 1..17: mol_type = other DNA
tccagggcgtcccagtg

SEQ ID NO: 186146 - DNA, 17 bp, synthetic construct
  source 1..17: mol_type = other DNA
ttccagggcgtcccagt

SEQ ID NO: 186147 - DNA, 17 bp, synthetic construct
  source 1..17: mol_type = other DNA
gttccagggcgtcccag

SEQ ID NO: 186148 - DNA, 17 bp, synthetic construct
  source 1..17: mol_type = other DNA
tgttccagggcgtccca

SEQ ID NO: 186149 - DNA, 17 bp, synthetic construct
  source 1..17: mol_type = other DNA
ttgttccagggcgtccc

SEQ ID NO: 186150 - DNA, 17 bp, synthetic construct
  source 1..17: mol_type = other DNA
tttgttccagggcgtcc

SEQ ID NO: 186151 - DNA, 17 bp, synthetic construct
  source 1..17: mol_type = other DNA
gtttgttccagggcgtc

SEQ ID NO: 186152 - DNA, 17 bp, synthetic construct
  source 1..17: mol_type = other DNA
agtttgttccagggcgt

SEQ ID NO: 186153 - DNA, 17 bp, synthetic construct
  source 1..17: mol_type = other DNA
tagtttgttccagggcg

SEQ ID NO: 186154 - DNA, 17 bp, synthetic construct
  source 1..17: mol_type = other DNA
ttagtttgttccagggc

SEQ ID NO: 186155 - DNA, 17 bp, synthetic construct
  source 1..17: mol_type = other DNA
cttagtttgttccaggg

SEQ ID NO: 186156 - DNA, 17 bp, synthetic construct
  source 1..17: mol_type = other DNA
gcttagtttgttccagg

SEQ ID NO: 186157 - DNA, 17 bp, synthetic construct
  source 1..17: mol_type = other DNA
tgcttagtttgttccag

SEQ ID NO: 186158 - DNA, 17 bp, synthetic construct
  source 1..17: mol_type = other DNA
atgcttagtttgttcca

SEQ ID NO: 186159 - DNA, 17 bp, synthetic construct
  source 1..17: mol_type = other DNA
catgcttagtttgttcc

SEQ ID NO: 186160 - DNA, 17 bp, synthetic construct
  source 1..17: mol_type = other DNA
acatgcttagtttgttc

SEQ ID NO: 186161 - DNA, 17 bp, synthetic construct
  source 1..17: mol_type = other DNA
cacatgcttagtttgtt

SEQ ID NO: 186162 - DNA, 17 bp, synthetic construct
  source 1..17: mol_type = other DNA
gcacatgcttagtttgt

SEQ ID NO: 186163 - DNA, 17 bp, synthetic construct
  source 1..17: mol_type = other DNA
cgcacatgcttagtttg

SEQ ID NO: 186164 - DNA, 17 bp, synthetic construct
  source 1..17: mol_type = other DNA
ccgcacatgcttagttt

SEQ ID NO: 186165 - DNA, 17 bp, synthetic construct
  source 1..17: mol_type = other DNA
cccgcacatgcttagtt

SEQ ID NO: 186166 - DNA, 17 bp, synthetic construct
  source 1..17: mol_type = other DNA
gcccgcacatgcttagt

SEQ ID NO: 186167 - DNA, 17 bp, synthetic construct
  source 1..17: mol_type = other DNA
ggcccgcacatgcttag

SEQ ID NO: 186168 - DNA, 17 bp, synthetic construct
  source 1..17: mol_type = other DNA
aggcccgcacatgctta

SEQ ID NO: 186169 - DNA, 17 bp, synthetic construct
  source 1..17: mol_type = other DNA
taggcccgcacatgctt

SEQ ID NO: 186170 - DNA, 17 bp, synthetic construct
  source 1..17: mol_type = other DNA
ataggcccgcacatgct

SEQ ID NO: 186171 - DNA, 17 bp, synthetic construct
  source 1..17: mol_type = other DNA
cataggcccgcacatgc

SEQ ID NO: 186172 - DNA, 17 bp, synthetic construct
  source 1..17: mol_type = other DNA
acataggcccgcacatg

SEQ ID NO: 186173 - DNA, 17 bp, synthetic construct
  source 1..17: mol_type = other DNA
cacataggcccgcacat

SEQ ID NO: 186174 - DNA, 17 bp, synthetic construct
  source 1..17: mol_type = other DNA
acacataggcccgcaca

SEQ ID NO: 186175 - DNA, 17 bp, synthetic construct
  source 1..17: mol_type = other DNA
gacacataggcccgcac

SEQ ID NO: 186176 - DNA, 17 bp, synthetic construct
  source 1..17: mol_type = other DNA
ggacacataggcccgca

SEQ ID NO: 186177 - DNA, 17 bp, synthetic construct
  source 1..17: mol_type = other DNA
gggacacataggcccgc

SEQ ID NO: 186178 - DNA, 17 bp, synthetic construct
  source 1..17: mol_type = other DNA
agggacacataggcccg

SEQ ID NO: 186179 - DNA, 17 bp, synthetic construct
  source 1..17: mol_type = other DNA
cagggacacataggccc

SEQ ID NO: 186180 - DNA, 17 bp, synthetic construct
  source 1..17: mol_type = other DNA
gcagggacacataggcc

SEQ ID NO: 186181 - DNA, 17 bp, synthetic construct
  source 1..17: mol_type = other DNA
ggcagggacacataggc

SEQ ID NO: 186182 - DNA, 17 bp, synthetic construct
  source 1..17: mol_type = other DNA
tggcagggacacatagg

SEQ ID NO: 186183 - DNA, 17 bp, synthetic construct
  source 1..17: mol_type = other DNA
gtggcagggacacatag

SEQ ID NO: 186184 - DNA, 17 bp, synthetic construct
  source 1..17: mol_type = other DNA
cgtggcagggacacata

SEQ ID NO: 186185 - DNA, 17 bp, synthetic construct
  source 1..17: mol_type = other DNA
ccgtggcagggacacat

SEQ ID NO: 186186 - DNA, 17 bp, synthetic construct
  source 1..17: mol_type = other DNA
gccgtggcagggacaca

SEQ ID NO: 186187 - DNA, 17 bp, synthetic construct
  source 1..17: mol_type = other DNA
ggccgtggcagggacac

SEQ ID NO: 186188 - DNA, 17 bp, synthetic construct
  source 1..17: mol_type = other DNA
cggccgtggcagggaca

SEQ ID NO: 186189 - DNA, 17 bp, synthetic construct
  source 1..17: mol_type = other DNA
ccggccgtggcagggac

SEQ ID NO: 186190 - DNA, 17 bp, synthetic construct
  source 1..17: mol_type = other DNA
tccggccgtggcaggga

SEQ ID NO: 186191 - DNA, 17 bp, synthetic construct
  source 1..17: mol_type = other DNA
ctccggccgtggcaggg

SEQ ID NO: 186192 - DNA, 17 bp, synthetic construct
  source 1..17: mol_type = other DNA
gctccggccgtggcagg

SEQ ID NO: 186193 - DNA, 17 bp, synthetic construct
  source 1..17: mol_type = other DNA
cgctccggccgtggcag

SEQ ID NO: 186194 - DNA, 17 bp, synthetic construct
  source 1..17: mol_type = other DNA
gcgctccggccgtggca

SEQ ID NO: 186195 - DNA, 17 bp, synthetic construct
  source 1..17: mol_type = other DNA
ggcgctccggccgtggc

SEQ ID NO: 186196 - DNA, 17 bp, synthetic construct
  source 1..17: mol_type = other DNA
gggcgctccggccgtgg

SEQ ID NO: 186197 - DNA, 17 bp, synthetic construct
  source 1..17: mol_type = other DNA
cgggcgctccggccgtg

SEQ ID NO: 186198 - DNA, 17 bp, synthetic construct
  source 1..17: mol_type = other DNA
gcgggcgctccggccgt

SEQ ID NO: 186199 - DNA, 17 bp, synthetic construct
  source 1..17: mol_type = other DNA
cgcgggcgctccggccg

SEQ ID NO: 186200 - DNA, 17 bp, synthetic construct
  source 1..17: mol_type = other DNA
gcgcgggcgctccggcc

SEQ ID NO: 186201 - DNA, 17 bp, synthetic construct
  source 1..17: mol_type = other DNA
tgcgcgggcgctccggc

SEQ ID NO: 186202 - DNA, 17 bp, synthetic construct
  source 1..17: mol_type = other DNA
ctgcgcgggcgctccgg

SEQ ID NO: 186203 - DNA, 17 bp, synthetic construct
  source 1..17: mol_type = other DNA
gctgcgcgggcgctccg

SEQ ID NO: 186204 - DNA, 17 bp, synthetic construct
  source 1..17: mol_type = other DNA
tgctgcgcgggcgctcc

SEQ ID NO: 186205 - DNA, 17 bp, synthetic construct
  source 1..17: mol_type = other DNA
gtgctgcgcgggcgctc

SEQ ID NO: 186206 - DNA, 17 bp, synthetic construct
  source 1..17: mol_type = other DNA
cgtgctgcgcgggcgct

SEQ ID NO: 186207 - DNA, 17 bp, synthetic construct
  source 1..17: mol_type = other DNA
ccgtgctgcgcgggcgc

SEQ ID NO: 186208 - DNA, 17 bp, synthetic construct
  source 1..17: mol_type = other DNA
tccgtgctgcgcgggcg

SEQ ID NO: 186209 - DNA, 17 bp, synthetic construct
  source 1..17: mol_type = other DNA
atccgtgctgcgcgggc

SEQ ID NO: 186210 - DNA, 17 bp, synthetic construct
  source 1..17: mol_type = other DNA
aatccgtgctgcgcggg

SEQ ID NO: 186211 - DNA, 17 bp, synthetic construct
  source 1..17: mol_type = other DNA
gaatccgtgctgcgcgg

SEQ ID NO: 186212 - DNA, 17 bp, synthetic construct
  source 1..17: mol_type = other DNA
ggaatccgtgctgcgcg

SEQ ID NO: 186213 - DNA, 17 bp, synthetic construct
  source 1..17: mol_type = other DNA
tggaatccgtgctgcgc

SEQ ID NO: 186214 - DNA, 17 bp, synthetic construct
  source 1..17: mol_type = other DNA
ctggaatccgtgctgcg

SEQ ID NO: 186215 - DNA, 17 bp, synthetic construct
  source 1..17: mol_type = other DNA
gctggaatccgtgctgc

SEQ ID NO: 186216 - DNA, 17 bp, synthetic construct
  source 1..17: mol_type = other DNA
agctggaatccgtgctg

SEQ ID NO: 186217 - DNA, 17 bp, synthetic construct
  source 1..17: mol_type = other DNA
cagctggaatccgtgct

SEQ ID NO: 186218 - DNA, 17 bp, synthetic construct
  source 1..17: mol_type = other DNA
ccagctggaatccgtgc

SEQ ID NO: 186219 - DNA, 17 bp, synthetic construct
  source 1..17: mol_type = other DNA
gccagctggaatccgtg

SEQ ID NO: 186220 - DNA, 17 bp, synthetic construct
  source 1..17: mol_type = other DNA
ggccagctggaatccgt

SEQ ID NO: 186221 - DNA, 17 bp, synthetic construct
  source 1..17: mol_type = other DNA
tggccagctggaatccg

SEQ ID NO: 186222 - DNA, 17 bp, synthetic construct
  source 1..17: mol_type = other DNA
gtggccagctggaatcc

SEQ ID NO: 186223 - DNA, 17 bp, synthetic construct
  source 1..17: mol_type = other DNA
cgtggccagctggaatc

SEQ ID NO: 186224 - DNA, 17 bp, synthetic construct
  source 1..17: mol_type = other DNA
acgtggccagctggaat

SEQ ID NO: 186225 - DNA, 17 bp, synthetic construct
  source 1..17: mol_type = other DNA
gacgtggccagctggaa

SEQ ID NO: 186226 - DNA, 17 bp, synthetic construct
  source 1..17: mol_type = other DNA
ggacgtggccagctgga

SEQ ID NO: 186227 - DNA, 17 bp, synthetic construct
  source 1..17: mol_type = other DNA
cggacgtggccagctgg

SEQ ID NO: 186228 - DNA, 17 bp, synthetic construct
  source 1..17: mol_type = other DNA
ccggacgtggccagctg

SEQ ID NO: 186229 - DNA, 17 bp, synthetic construct
  source 1..17: mol_type = other DNA
gccggacgtggccagct

SEQ ID NO: 186230 - DNA, 17 bp, synthetic construct
  source 1..17: mol_type = other DNA
ggccggacgtggccagc

SEQ ID NO: 186231 - DNA, 17 bp, synthetic construct
  source 1..17: mol_type = other DNA
cggccggacgtggccag

SEQ ID NO: 186232 - DNA, 17 bp, synthetic construct
  source 1..17: mol_type = other DNA
gcggccggacgtggcca

SEQ ID NO: 186233 - DNA, 17 bp, synthetic construct
  source 1..17: mol_type = other DNA
agcggccggacgtggcc

SEQ ID NO: 186234 - DNA, 17 bp, synthetic construct
  source 1..17: mol_type = other DNA
cagcggccggacgtggc

SEQ ID NO: 186235 - DNA, 17 bp, synthetic construct
  source 1..17: mol_type = other DNA
ccagcggccggacgtgg

SEQ ID NO: 186236 - DNA, 17 bp, synthetic construct
  source 1..17: mol_type = other DNA
cccagcggccggacgtg

SEQ ID NO: 186237 - DNA, 17 bp, synthetic construct
  source 1..17: mol_type = other DNA
ccccagcggccggacgt

SEQ ID NO: 186238 - DNA, 17 bp, synthetic construct
  source 1..17: mol_type = other DNA
gccccagcggccggacg

SEQ ID NO: 186239 - DNA, 17 bp, synthetic construct
  source 1..17: mol_type = other DNA
tgccccagcggccggac

SEQ ID NO: 186240 - DNA, 17 bp, synthetic construct
  source 1..17: mol_type = other DNA
ctgccccagcggccgga

SEQ ID NO: 186241 - DNA, 17 bp, synthetic construct
  source 1..17: mol_type = other DNA
tctgccccagcggccgg

SEQ ID NO: 186242 - DNA, 17 bp, synthetic construct
  source 1..17: mol_type = other DNA
gtctgccccagcggccg

SEQ ID NO: 186243 - DNA, 17 bp, synthetic construct
  source 1..17: mol_type = other DNA
tgtctgccccagcggcc

SEQ ID NO: 186244 - DNA, 17 bp, synthetic construct
  source 1..17: mol_type = other DNA
ctgtctgccccagcggc

SEQ ID NO: 186245 - DNA, 17 bp, synthetic construct
  source 1..17: mol_type = other DNA
cctgtctgccccagcgg

SEQ ID NO: 186246 - DNA, 17 bp, synthetic construct
  source 1..17: mol_type = other DNA
gcctgtctgccccagcg

SEQ ID NO: 186247 - DNA, 17 bp, synthetic construct
  source 1..17: mol_type = other DNA
agcctgtctgccccagc

SEQ ID NO: 186248 - DNA, 17 bp, synthetic construct
  source 1..17: mol_type = other DNA
cagcctgtctgccccag

SEQ ID NO: 186249 - DNA, 17 bp, synthetic construct
  source 1..17: mol_type = other DNA
ccagcctgtctgcccca

SEQ ID NO: 186250 - DNA, 17 bp, synthetic construct
  source 1..17: mol_type = other DNA
accagcctgtctgcccc

SEQ ID NO: 186251 - DNA, 17 bp, synthetic construct
  source 1..17: mol_type = other DNA
gaccagcctgtctgccc

SEQ ID NO: 186252 - DNA, 17 bp, synthetic construct
  source 1..17: mol_type = other DNA
ggaccagcctgtctgcc

SEQ ID NO: 186253 - DNA, 17 bp, synthetic construct
  source 1..17: mol_type = other DNA
tggaccagcctgtctgc

SEQ ID NO: 186254 - DNA, 17 bp, synthetic construct
  source 1..17: mol_type = other DNA
ctggaccagcctgtctg

SEQ ID NO: 186255 - DNA, 17 bp, synthetic construct
  source 1..17: mol_type = other DNA
cctggaccagcctgtct

SEQ ID NO: 186256 - DNA, 17 bp, synthetic construct
  source 1..17: mol_type = other DNA
gcctggaccagcctgtc

SEQ ID NO: 186257 - DNA, 17 bp, synthetic construct
  source 1..17: mol_type = other DNA
tgcctggaccagcctgt

SEQ ID NO: 186258 - DNA, 17 bp, synthetic construct
  source 1..17: mol_type = other DNA
ttgcctggaccagcctg

SEQ ID NO: 186259 - DNA, 17 bp, synthetic construct
  source 1..17: mol_type = other DNA
cttgcctggaccagcct

SEQ ID NO: 186260 - DNA, 17 bp, synthetic construct
  source 1..17: mol_type = other DNA
ccttgcctggaccagcc

SEQ ID NO: 186261 - DNA, 17 bp, synthetic construct
  source 1..17: mol_type = other DNA
gccttgcctggaccagc

SEQ ID NO: 186262 - DNA, 17 bp, synthetic construct
  source 1..17: mol_type = other DNA
ggccttgcctggaccag

SEQ ID NO: 186263 - DNA, 17 bp, synthetic construct
  source 1..17: mol_type = other DNA
tggccttgcctggacca

SEQ ID NO: 186264 - DNA, 17 bp, synthetic construct
  source 1..17: mol_type = other DNA
ctggccttgcctggacc

SEQ ID NO: 186265 - DNA, 17 bp, synthetic construct
  source 1..17: mol_type = other DNA
gctggccttgcctggac

SEQ ID NO: 186266 - DNA, 17 bp, synthetic construct
  source 1..17: mol_type = other DNA
agctggccttgcctgga

SEQ ID NO: 186267 - DNA, 17 bp, synthetic construct
  source 1..17: mol_type = other DNA
cagctggccttgcctgg

SEQ ID NO: 186268 - DNA, 17 bp, synthetic construct
  source 1..17: mol_type = other DNA
gcagctggccttgcctg

SEQ ID NO: 186269 - DNA, 17 bp, synthetic construct
  source 1..17: mol_type = other DNA
agcagctggccttgcct

SEQ ID NO: 186270 - DNA, 17 bp, synthetic construct
  source 1..17: mol_type = other DNA
cagcagctggccttgcc

SEQ ID NO: 186271 - DNA, 17 bp, synthetic construct
  source 1..17: mol_type = other DNA
gcagcagctggccttgc

SEQ ID NO: 186272 - DNA, 17 bp, synthetic construct
  source 1..17: mol_type = other DNA
ggcagcagctggccttg

SEQ ID NO: 186273 - DNA, 17 bp, synthetic construct
  source 1..17: mol_type = other DNA
tggcagcagctggcctt

SEQ ID NO: 186274 - DNA, 17 bp, synthetic construct
  source 1..17: mol_type = other DNA
ctggcagcagctggcct

SEQ ID NO: 186275 - DNA, 17 bp, synthetic construct
  source 1..17: mol_type = other DNA
cctggcagcagctggcc

SEQ ID NO: 186276 - DNA, 17 bp, synthetic construct
  source 1..17: mol_type = other DNA
tcctggcagcagctggc

SEQ ID NO: 186277 - DNA, 17 bp, synthetic construct
  source 1..17: mol_type = other DNA
ttcctggcagcagctgg

SEQ ID NO: 186278 - DNA, 17 bp, synthetic construct
  source 1..17: mol_type = other DNA
cttcctggcagcagctg

SEQ ID NO: 186279 - DNA, 17 bp, synthetic construct
  source 1..17: mol_type = other DNA
gcttcctggcagcagct

SEQ ID NO: 186280 - DNA, 17 bp, synthetic construct
  source 1..17: mol_type = other DNA
agcttcctggcagcagc

SEQ ID NO: 186281 - DNA, 17 bp, synthetic construct
  source 1..17: mol_type = other DNA
cagcttcctggcagcag

SEQ ID NO: 186282 - DNA, 17 bp, synthetic construct
  source 1..17: mol_type = other DNA
gcagcttcctggcagca

SEQ ID NO: 186283 - DNA, 17 bp, synthetic construct
  source 1..17: mol_type = other DNA
cgcagcttcctggcagc

SEQ ID NO: 186284 - DNA, 17 bp, synthetic construct
  source 1..17: mol_type = other DNA
tcgcagcttcctggcag

SEQ ID NO: 186285 - DNA, 17 bp, synthetic construct
  source 1..17: mol_type = other DNA
gtcgcagcttcctggca

SEQ ID NO: 186286 - DNA, 17 bp, synthetic construct
  source 1..17: mol_type = other DNA
tgtcgcagcttcctggc

SEQ ID NO: 186287 - DNA, 17 bp, synthetic construct
  source 1..17: mol_type = other DNA
ctgtcgcagcttcctgg

SEQ ID NO: 186288 - DNA, 17 bp, synthetic construct
  source 1..17: mol_type = other DNA
cctgtcgcagcttcctg

SEQ ID NO: 186289 - DNA, 17 bp, synthetic construct
  source 1..17: mol_type = other DNA
gcctgtcgcagcttcct

SEQ ID NO: 186290 - DNA, 17 bp, synthetic construct
  source 1..17: mol_type = other DNA
tgcctgtcgcagcttcc

SEQ ID NO: 186291 - DNA, 17 bp, synthetic construct
  source 1..17: mol_type = other DNA
ttgcctgtcgcagcttc

SEQ ID NO: 186292 - DNA, 17 bp, synthetic construct
  source 1..17: mol_type = other DNA
cttgcctgtcgcagctt

SEQ ID NO: 186293 - DNA, 17 bp, synthetic construct
  source 1..17: mol_type = other DNA
ccttgcctgtcgcagct

SEQ ID NO: 186294 - DNA, 17 bp, synthetic construct
  source 1..17: mol_type = other DNA
gccttgcctgtcgcagc

SEQ ID NO: 186295 - DNA, 17 bp, synthetic construct
  source 1..17: mol_type = other DNA
cgccttgcctgtcgcag

SEQ ID NO: 186296 - DNA, 17 bp, synthetic construct
  source 1..17: mol_type = other DNA
ccgccttgcctgtcgca

SEQ ID NO: 186297 - DNA, 17 bp, synthetic construct
  source 1..17: mol_type = other DNA
gccgccttgcctgtcgc

SEQ ID NO: 186298 - DNA, 17 bp, synthetic construct
  source 1..17: mol_type = other DNA
ggccgccttgcctgtcg

SEQ ID NO: 186299 - DNA, 17 bp, synthetic construct
  source 1..17: mol_type = other DNA
cggccgccttgcctgtc

SEQ ID NO: 186300 - DNA, 17 bp, synthetic construct
  source 1..17: mol_type = other DNA
gcggccgccttgcctgt

SEQ ID NO: 186301 - DNA, 17 bp, synthetic construct
  source 1..17: mol_type = other DNA
ggcggccgccttgcctg

SEQ ID NO: 186302 - DNA, 17 bp, synthetic construct
  source 1..17: mol_type = other DNA
aggcggccgccttgcct

SEQ ID NO: 186303 - DNA, 17 bp, synthetic construct
  source 1..17: mol_type = other DNA
caggcggccgccttgcc

SEQ ID NO: 186304 - DNA, 17 bp, synthetic construct
  source 1..17: mol_type = other DNA
acaggcggccgccttgc

SEQ ID NO: 186305 - DNA, 17 bp, synthetic construct
  source 1..17: mol_type = other DNA
gacaggcggccgccttg

SEQ ID NO: 186306 - DNA, 17 bp, synthetic construct
  source 1..17: mol_type = other DNA
ggacaggcggccgcctt

SEQ ID NO: 186307 - DNA, 17 bp, synthetic construct
  source 1..17: mol_type = other DNA
tggacaggcggccgcct

SEQ ID NO: 186308 - DNA, 17 bp, synthetic construct
  source 1..17: mol_type = other DNA
atggacaggcggccgcc

SEQ ID NO: 186309 - DNA, 17 bp, synthetic construct
  source 1..17: mol_type = other DNA
catggacaggcggccgc

SEQ ID NO: 186310 - DNA, 17 bp, synthetic construct
  source 1..17: mol_type = other DNA
gcatggacaggcggccg

SEQ ID NO: 186311 - DNA, 17 bp, synthetic construct
  source 1..17: mol_type = other DNA
ggcatggacaggcggcc

SEQ ID NO: 186312 - DNA, 17 bp, synthetic construct
  source 1..17: mol_type = other DNA
aggcatggacaggcggc

SEQ ID NO: 186313 - DNA, 17 bp, synthetic construct
  source 1..17: mol_type = other DNA
caggcatggacaggcgg

SEQ ID NO: 186314 - DNA, 17 bp, synthetic construct
  source 1..17: mol_type = other DNA
gcaggcatggacaggcg

SEQ ID NO: 186315 - DNA, 17 bp, synthetic construct
  source 1..17: mol_type = other DNA
agcaggcatggacaggc

SEQ ID NO: 186316 - DNA, 17 bp, synthetic construct
  source 1..17: mol_type = other DNA
cagcaggcatggacagg

SEQ ID NO: 186317 - DNA, 17 bp, synthetic construct
  source 1..17: mol_type = other DNA
gcagcaggcatggacag

SEQ ID NO: 186318 - DNA, 17 bp, synthetic construct
  source 1..17: mol_type = other DNA
tgcagcaggcatggaca

SEQ ID NO: 186319 - DNA, 17 bp, synthetic construct
  source 1..17: mol_type = other DNA
ctgcagcaggcatggac

SEQ ID NO: 186320 - DNA, 17 bp, synthetic construct
  source 1..17: mol_type = other DNA
cctgcagcaggcatgga

SEQ ID NO: 186321 - DNA, 17 bp, synthetic construct
  source 1..17: mol_type = other DNA
ccctgcagcaggcatgg

SEQ ID NO: 186322 - DNA, 17 bp, synthetic construct
  source 1..17: mol_type = other DNA
accctgcagcaggcatg

SEQ ID NO: 186323 - DNA, 17 bp, synthetic construct
  source 1..17: mol_type = other DNA
taccctgcagcaggcat

SEQ ID NO: 186324 - DNA, 17 bp, synthetic construct
  source 1..17: mol_type = other DNA
ttaccctgcagcaggca

SEQ ID NO: 186325 - DNA, 17 bp, synthetic construct
  source 1..17: mol_type = other DNA
gttaccctgcagcaggc

SEQ ID NO: 186326 - DNA, 17 bp, synthetic construct
  source 1..17: mol_type = other DNA
agttaccctgcagcagg

SEQ ID NO: 186327 - DNA, 17 bp, synthetic construct
  source 1..17: mol_type = other DNA
gagttaccctgcagcag

SEQ ID NO: 186328 - DNA, 17 bp, synthetic construct
  source 1..17: mol_type = other DNA
tgagttaccctgcagca

SEQ ID NO: 186329 - DNA, 17 bp, synthetic construct
  source 1..17: mol_type = other DNA
ctgagttaccctgcagc

SEQ ID NO: 186330 - DNA, 17 bp, synthetic construct
  source 1..17: mol_type = other DNA
cctgagttaccctgcag

SEQ ID NO: 186331 - DNA, 17 bp, synthetic construct
  source 1..17: mol_type = other DNA
ccctgagttaccctgca

SEQ ID NO: 186332 - DNA, 17 bp, synthetic construct
  source 1..17: mol_type = other DNA
gccctgagttaccctgc

SEQ ID NO: 186333 - DNA, 17 bp, synthetic construct
  source 1..17: mol_type = other DNA
agccctgagttaccctg

SEQ ID NO: 186334 - DNA, 17 bp, synthetic construct
  source 1..17: mol_type = other DNA
cagccctgagttaccct

SEQ ID NO: 186335 - DNA, 17 bp, synthetic construct
  source 1..17: mol_type = other DNA
tcagccctgagttaccc

SEQ ID NO: 186336 - DNA, 17 bp, synthetic construct
  source 1..17: mol_type = other DNA
ctcagccctgagttacc

SEQ ID NO: 186337 - DNA, 17 bp, synthetic construct
  source 1..17: mol_type = other DNA
cctcagccctgagttac

SEQ ID NO: 186338 - DNA, 17 bp, synthetic construct
  source 1..17: mol_type = other DNA
acctcagccctgagtta

SEQ ID NO: 186339 - DNA, 17 bp, synthetic construct
  source 1..17: mol_type = other DNA
gacctcagccctgagtt

SEQ ID NO: 186340 - DNA, 17 bp, synthetic construct
  source 1..17: mol_type = other DNA
cgacctcagccctgagt

SEQ ID NO: 186341 - DNA, 17 bp, synthetic construct
  source 1..17: mol_type = other DNA
gcgacctcagccctgag

SEQ ID NO: 186342 - DNA, 17 bp, synthetic construct
  source 1..17: mol_type = other DNA
tgcgacctcagccctga

SEQ ID NO: 186343 - DNA, 17 bp, synthetic construct
  source 1..17: mol_type = other DNA
ttgcgacctcagccctg

SEQ ID NO: 186344 - DNA, 17 bp, synthetic construct
  source 1..17: mol_type = other DNA
gttgcgacctcagccct

SEQ ID NO: 186345 - DNA, 17 bp, synthetic construct
  source 1..17: mol_type = other DNA
cgttgcgacctcagccc

SEQ ID NO: 186346 - DNA, 17 bp, synthetic construct
  source 1..17: mol_type = other DNA
ccgttgcgacctcagcc

SEQ ID NO: 186347 - DNA, 17 bp, synthetic construct
  source 1..17: mol_type = other DNA
gccgttgcgacctcagc

SEQ ID NO: 186348 - DNA, 17 bp, synthetic construct
  source 1..17: mol_type = other DNA
ggccgttgcgacctcag

SEQ ID NO: 186349 - DNA, 17 bp, synthetic construct
  source 1..17: mol_type = other DNA
tggccgttgcgacctca

SEQ ID NO: 186350 - DNA, 17 bp, synthetic construct
  source 1..17: mol_type = other DNA
ctggccgttgcgacctc

SEQ ID NO: 186351 - DNA, 17 bp, synthetic construct
  source 1..17: mol_type = other DNA
cctggccgttgcgacct

SEQ ID NO: 186352 - DNA, 17 bp, synthetic construct
  source 1..17: mol_type = other DNA
acctggccgttgcgacc

SEQ ID NO: 186353 - DNA, 17 bp, synthetic construct
  source 1..17: mol_type = other DNA
gacctggccgttgcgac

SEQ ID NO: 186354 - DNA, 17 bp, synthetic construct
  source 1..17: mol_type = other DNA
tgacctggccgttgcga

SEQ ID NO: 186355 - DNA, 17 bp, synthetic construct
  source 1..17: mol_type = other DNA
ctgacctggccgttgcg

SEQ ID NO: 186356 - DNA, 17 bp, synthetic construct
  source 1..17: mol_type = other DNA
tctgacctggccgttgc

SEQ ID NO: 186357 - DNA, 17 bp, synthetic construct
  source 1..17: mol_type = other DNA
ctctgacctggccgttg

SEQ ID NO: 186358 - DNA, 17 bp, synthetic construct
  source 1..17: mol_type = other DNA
tctctgacctggccgtt

SEQ ID NO: 186359 - DNA, 17 bp, synthetic construct
  source 1..17: mol_type = other DNA
ctctctgacctggccgt

SEQ ID NO: 186360 - DNA, 17 bp, synthetic construct
  source 1..17: mol_type = other DNA
cctctctgacctggccg

SEQ ID NO: 186361 - DNA, 17 bp, synthetic construct
  source 1..17: mol_type = other DNA
ccctctctgacctggcc

SEQ ID NO: 186362 - DNA, 17 bp, synthetic construct
  source 1..17: mol_type = other DNA
cccctctctgacctggc

SEQ ID NO: 186363 - DNA, 17 bp, synthetic construct
  source 1..17: mol_type = other DNA
acccctctctgacctgg

SEQ ID NO: 186364 - DNA, 17 bp, synthetic construct
  source 1..17: mol_type = other DNA
gacccctctctgacctg

SEQ ID NO: 186365 - DNA, 17 bp, synthetic construct
  source 1..17: mol_type = other DNA
tgacccctctctgacct

SEQ ID NO: 186366 - DNA, 17 bp, synthetic construct
  source 1..17: mol_type = other DNA
ctgacccctctctgacc

SEQ ID NO: 186367 - DNA, 17 bp, synthetic construct
  source 1..17: mol_type = other DNA
gctgacccctctctgac

SEQ ID NO: 186368 - DNA, 17 bp, synthetic construct
  source 1..17: mol_type = other DNA
tgctgacccctctctga

SEQ ID NO: 186369 - DNA, 17 bp, synthetic construct
  source 1..17: mol_type = other DNA
atgctgacccctctctg

SEQ ID NO: 186370 - DNA, 17 bp, synthetic construct
  source 1..17: mol_type = other DNA
gatgctgacccctctct

SEQ ID NO: 186371 - DNA, 17 bp, synthetic construct
  source 1..17: mol_type = other DNA
ggatgctgacccctctc

SEQ ID NO: 186372 - DNA, 17 bp, synthetic construct
  source 1..17: mol_type = other DNA
gggatgctgacccctct

SEQ ID NO: 186373 - DNA, 17 bp, synthetic construct
  source 1..17: mol_type = other DNA
tgggatgctgacccctc

SEQ ID NO: 186374 - DNA, 17 bp, synthetic construct
  source 1..17: mol_type = other DNA
ttgggatgctgacccct

SEQ ID NO: 186375 - DNA, 17 bp, synthetic construct
  source 1..17: mol_type = other DNA
tttgggatgctgacccc

SEQ ID NO: 186376 - DNA, 17 bp, synthetic construct
  source 1..17: mol_type = other DNA
ctttgggatgctgaccc

SEQ ID NO: 186377 - DNA, 17 bp, synthetic construct
  source 1..17: mol_type = other DNA
gctttgggatgctgacc

SEQ ID NO: 186378 - DNA, 17 bp, synthetic construct
  source 1..17: mol_type = other DNA
ggctttgggatgctgac

SEQ ID NO: 186379 - DNA, 17 bp, synthetic construct
  source 1..17: mol_type = other DNA
gggctttgggatgctga

SEQ ID NO: 186380 - DNA, 17 bp, synthetic construct
  source 1..17: mol_type = other DNA
ggggctttgggatgctg

SEQ ID NO: 186381 - DNA, 17 bp, synthetic construct
  source 1..17: mol_type = other DNA
gggggctttgggatgct

SEQ ID NO: 186382 - DNA, 17 bp, synthetic construct
  source 1..17: mol_type = other DNA
agggggctttgggatgc

SEQ ID NO: 186383 - DNA, 17 bp, synthetic construct
  source 1..17: mol_type = other DNA
gagggggctttgggatg

SEQ ID NO: 186384 - DNA, 17 bp, synthetic construct
  source 1..17: mol_type = other DNA
agagggggctttgggat

SEQ ID NO: 186385 - DNA, 17 bp, synthetic construct
  source 1..17: mol_type = other DNA
cagagggggctttggga

SEQ ID NO: 186386 - DNA, 17 bp, synthetic construct
  source 1..17: mol_type = other DNA
gcagagggggctttggg

SEQ ID NO: 186387 - DNA, 17 bp, synthetic construct
  source 1..17: mol_type = other DNA
agcagagggggctttgg

SEQ ID NO: 186388 - DNA, 17 bp, synthetic construct
  source 1..17: mol_type = other DNA
gagcagagggggctttg

SEQ ID NO: 186389 - DNA, 17 bp, synthetic construct
  source 1..17: mol_type = other DNA
tgagcagagggggcttt

SEQ ID NO: 186390 - DNA, 17 bp, synthetic construct
  source 1..17: mol_type = other DNA
ttgagcagagggggctt

SEQ ID NO: 186391 - DNA, 17 bp, synthetic construct
  source 1..17: mol_type = other DNA
gttgagcagagggggct

SEQ ID NO: 186392 - DNA, 17 bp, synthetic construct
  source 1..17: mol_type = other DNA
ggttgagcagagggggc

SEQ ID NO: 186393 - DNA, 17 bp, synthetic construct
  source 1..17: mol_type = other DNA
gggttgagcagaggggg

SEQ ID NO: 186394 - DNA, 17 bp, synthetic construct
  source 1..17: mol_type = other DNA
tgggttgagcagagggg

SEQ ID NO: 186395 - DNA, 17 bp, synthetic construct
  source 1..17: mol_type = other DNA
ctgggttgagcagaggg

SEQ ID NO: 186396 - DNA, 17 bp, synthetic construct
  source 1..17: mol_type = other DNA
gctgggttgagcagagg

SEQ ID NO: 186397 - DNA, 17 bp, synthetic construct
  source 1..17: mol_type = other DNA
ggctgggttgagcagag

SEQ ID NO: 186398 - DNA, 17 bp, synthetic construct
  source 1..17: mol_type = other DNA
gggctgggttgagcaga

SEQ ID NO: 186399 - DNA, 17 bp, synthetic construct
  source 1..17: mol_type = other DNA
tgggctgggttgagcag

SEQ ID NO: 186400 - DNA, 17 bp, synthetic construct
  source 1..17: mol_type = other DNA
ctgggctgggttgagca

SEQ ID NO: 186401 - DNA, 17 bp, synthetic construct
  source 1..17: mol_type = other DNA
actgggctgggttgagc

SEQ ID NO: 186402 - DNA, 17 bp, synthetic construct
  source 1..17: mol_type = other DNA
aactgggctgggttgag

SEQ ID NO: 186403 - DNA, 17 bp, synthetic construct
  source 1..17: mol_type = other DNA
aaactgggctgggttga

SEQ ID NO: 186404 - DNA, 17 bp, synthetic construct
  source 1..17: mol_type = other DNA
aaaactgggctgggttg

SEQ ID NO: 186405 - DNA, 17 bp, synthetic construct
  source 1..17: mol_type = other DNA
caaaactgggctgggtt

SEQ ID NO: 186406 - DNA, 17 bp, synthetic construct
  source 1..17: mol_type = other DNA
gcaaaactgggctgggt

SEQ ID NO: 186407 - DNA, 17 bp, synthetic construct
  source 1..17: mol_type = other DNA
tgcaaaactgggctggg

SEQ ID NO: 186408 - DNA, 17 bp, synthetic construct
  source 1..17: mol_type = other DNA
ttgcaaaactgggctgg

SEQ ID NO: 186409 - DNA, 17 bp, synthetic construct
  source 1..17: mol_type = other DNA
tttgcaaaactgggctg

SEQ ID NO: 186410 - DNA, 17 bp, synthetic construct
  source 1..17: mol_type = other DNA
atttgcaaaactgggct

SEQ ID NO: 186411 - DNA, 17 bp, synthetic construct
  source 1..17: mol_type = other DNA
tatttgcaaaactgggc

SEQ ID NO: 186412 - DNA, 17 bp, synthetic construct
  source 1..17: mol_type = other DNA
ttatttgcaaaactggg

SEQ ID NO: 186413 - DNA, 17 bp, synthetic construct
  source 1..17: mol_type = other DNA
tttatttgcaaaactgg

SEQ ID NO: 186414 - DNA, 17 bp, synthetic construct
  source 1..17: mol_type = other DNA
gtttatttgcaaaactg

SEQ ID NO: 186415 - DNA, 17 bp, synthetic construct
  source 1..17: mol_type = other DNA
ggtttatttgcaaaact

SEQ ID NO: 186416 - DNA, 17 bp, synthetic construct
  source 1..17: mol_type = other DNA
gggtttatttgcaaaac

SEQ ID NO: 186417 - DNA, 17 bp, synthetic construct
  source 1..17: mol_type = other DNA
agggtttatttgcaaaa

SEQ ID NO: 186418 - DNA, 17 bp, synthetic construct
  source 1..17: mol_type = other DNA
cagggtttatttgcaaa

SEQ ID NO: 186419 - DNA, 17 bp, synthetic construct
  source 1..17: mol_type = other DNA
tcagggtttatttgcaa

SEQ ID NO: 186420 - DNA, 17 bp, synthetic construct
  source 1..17: mol_type = other DNA
ctcagggtttatttgca

SEQ ID NO: 186421 - DNA, 17 bp, synthetic construct
  source 1..17: mol_type = other DNA
gctcagggtttatttgc

SEQ ID NO: 186422 - DNA, 17 bp, synthetic construct
  source 1..17: mol_type = other DNA
tgctcagggtttatttg

SEQ ID NO: 186423 - DNA, 17 bp, synthetic construct
  source 1..17: mol_type = other DNA
atgctcagggtttattt

SEQ ID NO: 186424 - DNA, 17 bp, synthetic construct
  source 1..17: mol_type = other DNA
aatgctcagggtttatt

SEQ ID NO: 186425 - DNA, 17 bp, synthetic construct
  source 1..17: mol_type = other DNA
caatgctcagggtttat

SEQ ID NO: 186426 - DNA, 17 bp, synthetic construct
  source 1..17: mol_type = other DNA
tcaatgctcagggttta

SEQ ID NO: 186427 - DNA, 17 bp, synthetic construct
  source 1..17: mol_type = other DNA
ctcaatgctcagggttt

SEQ ID NO: 186428 - DNA, 17 bp, synthetic construct
  source 1..17: mol_type = other DNA
actcaatgctcagggtt

SEQ ID NO: 186429 - DNA, 17 bp, synthetic construct
  source 1..17: mol_type = other DNA
tactcaatgctcagggt

SEQ ID NO: 186430-186499 - skipped (70 entries)

SEQ ID NO: 186500 - RNA, 21 nt, synthetic construct
  source 1..21: mol_type = other RNA
  modified_base 1: mod_base = OTHER; note = 2'-O-methylguanosine-3'-phosphorothioate
  modified_base 2: mod_base = OTHER; note = 2'-O-methyladenosine-3'-phosphorothioate
  modified_base 3: mod_base = OTHER; note = 2'-O-methylcytidine-3'-phosphate
  modified_base 4: mod_base = OTHER; note = 2'-O-methylguanosine-3'-phosphate
  modified_base 5: mod_base = OTHER; note = 2'-O-methyluridine-3'-phosphate
  modified_base 6: mod_base = OTHER; note = 2'-O-methyluridine-3'-phosphate
  modified_base 7: mod_base = OTHER; note = 2'-fluoroguanosine-3'-phosphate
  modified_base 8: mod_base = OTHER; note = 2'-O-methyladenosine-3'-phosphate
  modified_base 9: mod_base = OTHER; note = 2'-fluoroguanosine-3'-phosphate
  modified_base 10: mod_base = OTHER; note = 2'-fluorouridine-3'-phosphate
  modified_base 11: mod_base = OTHER; note = 2'-fluorocytidine-3'-phosphate
  modified_base 12: mod_base = OTHER; note = 2'-O-methylcytidine-3'-phosphate
  modified_base 13: mod_base = OTHER; note = 2'-O-methyluridine-3'-phosphate
  modified_base 14: mod_base = OTHER; note = 2'-O-methyladenosine-3'-phosphate
  modified_base 15: mod_base = OTHER; note = 2'-O-methylcytidine-3'-phosphate
  modified_base 16: mod_base = OTHER; note = 2'-O-methylguanosine-3'-phosphate
  modified_base 17: mod_base = OTHER; note = 2'-O-methyladenosine-3'-phosphate
  modified_base 18: mod_base = OTHER; note = 2'-O-methyluridine-3'-phosphate
  modified_base 19: mod_base = OTHER; note = 2'-O-methyladenosine-3'-phosphate
  modified_base 20: mod_base = OTHER; note = 2'-O-methyladenosine-3'-phosphate
  modified_base 21: mod_base = OTHER; note = 2'-O-methyladenosine-3'-phosphate
gacgttgagtcctacgataaa

SEQ ID NO: 186501 - RNA, 23 nt, synthetic construct
  source 1..23: mol_type = other RNA
  modified_base 1: mod_base = OTHER; note = 2'-O-methyluridine-3'-phosphorothioate
  modified_base 2: mod_base = OTHER; note = 2'-fluorouridine-3'-phosphorothioate
  modified_base 3: mod_base = OTHER; note = 2'-O-methyluridine-3'-phosphate
  modified_base 4: mod_base = OTHER; note = 2'-O-methyladenosine-3'-phosphate
  modified_base 5: mod_base = OTHER; note = 2'-O-methyluridine-3'-phosphate
  modified_base 6: mod_base = OTHER; note = 2'-fluorocytidine-3'-phosphate
  modified_base 7: mod_base = OTHER; note = 2'-O-methylguanosine-3'-phosphate
  modified_base 8: mod_base = OTHER; note = 2'-O-methyluridine-3'-phosphate
  modified_base 9: mod_base = OTHER; note = 2'-O-methyladenosine-3'-phosphate
  modified_base 10: mod_base = OTHER; note = 2'-O-methylguanosine-3'-phosphate
  modified_base 11: mod_base = OTHER; note = 2'-O-methylguanosine-3'-phosphate
  modified_base 12: mod_base = OTHER; note = 2'-O-methyladenosine-3'-phosphate
  modified_base 13: mod_base = OTHER; note = 2'-O-methylcytidine-3'-phosphate
  modified_base 14: mod_base = OTHER; note = 2'-fluorouridine-3'-phosphate
  modified_base 15: mod_base = OTHER; note = 2'-O-methylcytidine-3'-phosphate
  modified_base 16: mod_base = OTHER; note = 2'-fluoroadenosine-3'-phosphate
  modified_base 17: mod_base = OTHER; note = 2'-O-methyladenosine-3'-phosphate
  modified_base 18: mod_base = OTHER; note = 2'-O-methylcytidine-3'-phosphate
  modified_base 19: mod_base = OTHER; note = 2'-O-methylguanosine-3'-phosphate
  modified_base 20: mod_base = OTHER; note = 2'-O-methyluridine-3'-phosphate
  modified_base 21: mod_base = OTHER; note = 2'-O-methylcytidine-3'-phosphorothioate
  modified_base 22: mod_base = OTHER; note = 2'-O-methylcytidine-3'-phosphorothioate
  modified_base 23: mod_base = OTHER; note = 2'-O-methylcytidine-3'-phosphate
tttatcgtaggactcaacgtccc

SEQ ID NO: 186502 - RNA, 19 nt, synthetic construct
  source 1..19: mol_type = other RNA
  modified_base 1: mod_base = OTHER; note = 2'-O-methyladenosine-3'-phosphate
  modified_base 2: mod_base = OTHER; note = 2'-O-methyladenosine-3'-phosphate
  modified_base 4: mod_base = OTHER; note = 2'-O-methyluridine-3'-phosphate
  modified_base 5: mod_base = OTHER; note = 2'-O-methylcytidine-3'-phosphate
  modified_base 6: mod_base = OTHER; note = 2'-O-methylcytidine-3'-phosphate
  modified_base 10: mod_base = OTHER; note = 2'-O-methyluridine-3'-phosphate
  modified_base 11: mod_base = OTHER; note = 2'-O-methylguanosine-3'-phosphate
  modified_base 13: mod_base = OTHER; note = 2'-O-methyluridine-3'-phosphate
  modified_base 14: mod_base = OTHER; note = 2'-O-methylcytidine-3'-phosphate
  modified_base 15: mod_base = OTHER; note = 2'-O-methyluridine-3'-phosphate
  modified_base 16: mod_base = OTHER; note = 2'-O-methyladenosine-3'-phosphate
  modified_base 18: mod_base = OTHER; note = 2'-O-methyluridine-3'-phosphorothioate
  modified_base 19: mod_base = OTHER; note = 2'-O-methyladenosine-3'-phosphate
aaatccgtgtgttctacta

SEQ ID NO: 186503 - RNA, 19 nt, synthetic construct
  source 1..19: mol_type = other RNA
  modified_base 1: mod_base = OTHER; note = 2'-O-methyladenosine-3'-phosphate
  modified_base 2: mod_base = OTHER; note = 2'-O-methyladenosine-3'-phosphate
  modified_base 4: mod_base = OTHER; note = 2'-O-methyluridine-3'-phosphate
  modified_base 5: mod_base = OTHER; note = 2'-O-methylcytidine-3'-phosphate
  modified_base 6: mod_base = OTHER; note = 2'-O-methylcytidine-3'-phosphate
  modified_base 10: mod_base = OTHER; note = 2'-O-methyladenosine-3'-phosphate
  modified_base 11: mod_base = OTHER; note = 2'-O-methylguanosine-3'-phosphate
  modified_base 13: mod_base = OTHER; note = 2'-O-methyluridine-3'-phosphate
  modified_base 14: mod_base = OTHER; note = 2'-O-methylcytidine-3'-phosphate
  modified_base 15: mod_base = OTHER; note = 2'-O-methyluridine-3'-phosphate
  modified_base 16: mod_base = OTHER; note = 2'-O-methylguanosine-3'-phosphate
  modified_base 18: mod_base = OTHER; note = 2'-O-methyluridine-3'-phosphorothioate
  modified_base 19: mod_base = OTHER; note = 2'-O-methyladenosine-3'-phosphate
aaatccgtgagttctgcta

SEQ ID NO: 186504 - RNA, 19 nt, synthetic construct
  source 1..19: mol_type = other RNA
  modified_base 1: mod_base = OTHER; note = 2'-O-methyladenosine-3'-phosphate
  modified_base 2: mod_base = OTHER; note = 2'-O-methyladenosine-3'-phosphate
  modified_base 4: mod_base = OTHER; note = 2'-O-methyluridine-3'-phosphate
  modified_base 5: mod_base = OTHER; note = 2'-O-methylcytidine-3'-phosphate
  modified_base 6: mod_base = OTHER; note = 2'-O-methylcytidine-3'-phosphate
  modified_base 10: mod_base = OTHER; note = 2'-O-methyluridine-3'-phosphate
  modified_base 11: mod_base = OTHER; note = 2'-O-methylguanosine-3'-phosphate
  modified_base 13: mod_base = OTHER; note = 2'-O-methyluridine-3'-phosphate
  modified_base 14: mod_base = OTHER; note = 2'-O-methylcytidine-3'-phosphate
  modified_base 15: mod_base = OTHER; note = 2'-O-methyluridine-3'-phosphate
  modified_base 16: mod_base = OTHER; note = 2'-O-methylguanosine-3'-phosphate
  modified_base 18: mod_base = OTHER; note = 2'-O-methyluridine-3'-phosphorothioate
  modified_base 19: mod_base = OTHER; note = 2'-O-methyladenosine-3'-phosphate
aaatccgtctgttctgcta

SEQ ID NO: 186505 - RNA, 19 nt, synthetic construct
  source 1..19: mol_type = other RNA
  modified_base 1: mod_base = OTHER; note = 2'-O-methyladenosine-3'-phosphate
  modified_base 2: mod_base = OTHER; note = 2'-O-methyladenosine-3'-phosphate
  modified_base 4: mod_base = OTHER; note = 2'-O-methyluridine-3'-phosphate
  modified_base 5: mod_base = OTHER; note = 2'-O-methylcytidine-3'-phosphate
  modified_base 6: mod_base = OTHER; note = 2'-O-methylcytidine-3'-phosphate
  modified_base 10: mod_base = OTHER; note = 2'-O-methyluridine-3'-phosphate
  modified_base 11: mod_base = OTHER; note = 2'-O-methylguanosine-3'-phosphate
  modified_base 13: mod_base = OTHER; note = 2'-O-methyluridine-3'-phosphate
  modified_base 14: mod_base = OTHER; note = 2'-O-methylcytidine-3'-phosphate
  modified_base 15: mod_base = OTHER; note = 2'-O-methyluridine-3'-phosphate
  modified_base 16: mod_base = OTHER; note = 2'-O-methylguanosine-3'-phosphate
  modified_base 18: mod_base = OTHER; note = 2'-O-methyluridine-3'-phosphorothioate
  modified_base 19: mod_base = OTHER; note = 2'-O-methyladenosine-3'-phosphate
aaatccgagtgttctgcta

SEQ ID NO: 186506 - RNA, 19 nt, synthetic construct
  source 1..19: mol_type = other RNA
  modified_base 1: mod_base = OTHER; note = 2'-O-methylcytidine-3'-phosphate
  modified_base 2: mod_base = OTHER; note = 2'-O-methyladenosine-3'-phosphate
  modified_base 4: mod_base = OTHER; note = 2'-O-methyluridine-3'-phosphate
  modified_base 5: mod_base = OTHER; note = 2'-O-methylcytidine-3'-phosphate
  modified_base 6: mod_base = OTHER; note = 2'-O-methylcytidine-3'-phosphate
  modified_base 10: mod_base = OTHER; note = 2'-O-methyluridine-3'-phosphate
  modified_base 11: mod_base = OTHER; note = 2'-O-methylguanosine-3'-phosphate
  modified_base 13: mod_base = OTHER; note = 2'-O-methyluridine-3'-phosphate
  modified_base 14: mod_base = OTHER; note = 2'-O-methylcytidine-3'-phosphate
  modified_base 15: mod_base = OTHER; note = 2'-O-methyluridine-3'-phosphate
  modified_base 16: mod_base = OTHER; note = 2'-O-methylguanosine-3'-phosphate
  modified_base 18: mod_base = OTHER; note = 2'-O-methyluridine-3'-phosphorothioate
  modified_base 19: mod_base = OTHER; note = 2'-O-methyladenosine-3'-phosphate
caatccgtgtgttctgcta

SEQ ID NO: 186507 - RNA, 19 nt, synthetic construct
  source 1..19: mol_type = other RNA
  modified_base 1: mod_base = OTHER; note = 2'-O-methyladenosine-3'-phosphorothioate
  modified_base 2: mod_base = OTHER; note = 2'-O-methyladenosine-3'-phosphorothioate
  modified_base 4: mod_base = OTHER; note = 2'-O-methyluridine-3'-phosphate
  modified_base 5: mod_base = OTHER; note = 2'-O-methylcytidine-3'-phosphate
  modified_base 6: mod_base = OTHER; note = 2'-O-methylcytidine-3'-phosphate
  modified_base 10: mod_base = OTHER; note = 2'-O-methyluridine-3'-phosphate
  modified_base 11: mod_base = OTHER; note = 2'-O-methylguanosine-3'-phosphate
  modified_base 13: mod_base = OTHER; note = 2'-O-methyluridine-3'-phosphate
  modified_base 14: mod_base = OTHER; note = 2'-O-methylcytidine-3'-phosphate
  modified_base 15: mod_base = OTHER; note = 2'-O-methyluridine-3'-phosphate
  modified_base 16: mod_base = OTHER; note = 2'-O-methylguanosine-3'-phosphate
  modified_base 17: mod_base = OTHER; note = cytidine-3'-phosphorothioate
  modified_base 18: mod_base = OTHER; note = 2'-O-methyluridine-3'-phosphorothioate
  modified_base 19: mod_base = OTHER; note = 2'-O-methyladenosine-3'-phosphate
aaatccgtgtgttctgcta

SEQ ID NO: 186508 - DNA, 19 bp, synthetic construct
  source 1..19: mol_type = other DNA
  modified_base 1: mod_base = OTHER; note = 2'-O-methyladenosine-3'-phosphorothioate
  modified_base 2: mod_base = OTHER; note = 2'-O-methyladenosine-3'-phosphorothioate
  modified_base 4: mod_base = OTHER; note = 2'-O-methyluridine-3'-phosphate
  modified_base 5: mod_base = OTHER; note = 2'-O-methylcytidine-3'-phosphate
  modified_base 6: mod_base = OTHER; note = 2'-O-methylcytidine-3'-phosphate
  modified_base 10: mod_base = OTHER; note = 2'-O-methyluridine-3'-phosphate
  modified_base 11: mod_base = OTHER; note = 2'-O-methylguanosine-3'-phosphate
  modified_base 13: mod_base = OTHER; note = 2'-O-methyluridine-3'-phosphate
  modified_base 14: mod_base = OTHER; note = 2'-O-methylcytidine-3'-phosphate
  modified_base 15: mod_base = OTHER; note = 2'-O-methyluridine-3'-phosphate
  modified_base 16: mod_base = OTHER; note = 2'-O-methylguanosine-3'-phosphate
  modified_base 17: mod_base = OTHER; note = 2'-deoxycytidine-3'-phosphorothioate
  modified_base 18: mod_base = OTHER; note = 2'-O-methyluridine-3'-phosphorothioate
  modified_base 19: mod_base = OTHER; note = 2'-O-methyladenosine-3'-phosphate
  misc_feature 1..2: note = RNA
  misc_feature 3: note = DNA
  misc_feature 4..6: note = RNA
  misc_feature 7..9: note = DNA
  misc_feature 10..11: note = RNA
  misc_feature 12: note = DNA
  misc_feature 13..16: note = RNA
  misc_feature 17: note = DNA
  misc_feature 18..19: note = RNA
aaatccgtgtgttctgcta

SEQ ID NO: 186509 - RNA, 21 nt, synthetic construct
  source 1..21: mol_type = other RNA
  modified_base 1: mod_base = OTHER; note = 2'-O-methyluridine-3'-phosphate
  modified_base 2: mod_base = OTHER; note = 2'-O-methylguanosine-3'-phosphate
  modified_base 3: mod_base = OTHER; note = 2'-O-methyladenosine-3'-phosphate
  modified_base 4: mod_base = OTHER; note = 2'-O-methyladenosine-3'-phosphate
  modified_base 6: mod_base = OTHER; note = 2'-O-methyluridine-3'-phosphate
  modified_base 7: mod_base = OTHER; note = 2'-O-methylcytidine-3'-phosphate
  modified_base 8: mod_base = OTHER; note = 2'-O-methylcytidine-3'-phosphate
  modified_base 12: mod_base = OTHER; note = 2'-O-methyluridine-3'-phosphate
  modified_base 13: mod_base = OTHER; note = 2'-O-methylguanosine-3'-phosphate
  modified_base 14: mod_base = OTHER; note = 2'-O-methyluridine-3'-phosphate
  modified_base 15: mod_base = OTHER; note = 2'-O-methyluridine-3'-phosphate
  modified_base 16: mod_base = OTHER; note = 2'-O-methylcytidine-3'-phosphate
  modified_base 17: mod_base = OTHER; note = 2'-O-methyluridine-3'-phosphate
  modified_base 18: mod_base = OTHER; note = 2'-O-methyladenosine-3'-phosphate
  modified_base 20: mod_base = OTHER; note = 2'-O-methyluridine-3'-phosphorothioate
  modified_base 21: mod_base = OTHER; note = 2'-O-methyladenosine-3'-phosphate
tgaaatccgtgtgttctacta

SEQ ID NO: 186510 - RNA, 21 nt, synthetic construct
  source 1..21: mol_type = other RNA
  modified_base 1: mod_base = OTHER; note = 2'-O-methyluridine-3'-phosphate
  modified_base 2: mod_base = OTHER; note = 2'-O-methylguanosine-3'-phosphate
  modified_base 3: mod_base = OTHER; note = 2'-O-methyladenosine-3'-phosphate
  modified_base 4: mod_base = OTHER; note = 2'-O-methyladenosine-3'-phosphate
  modified_base 6: mod_base = OTHER; note = 2'-O-methyluridine-3'-phosphate
  modified_base 7: mod_base = OTHER; note = 2'-O-methylcytidine-3'-phosphate
  modified_base 8: mod_base = OTHER; note = 2'-O-methylcytidine-3'-phosphate
  modified_base 12: mod_base = OTHER; note = 2'-O-methyladenosine-3'-phosphate
  modified_base 13: mod_base = OTHER; note = 2'-O-methylguanosine-3'-phosphate
  modified_base 14: mod_base = OTHER; note = 2'-O-methyluridine-3'-phosphate
  modified_base 15: mod_base = OTHER; note = 2'-O-methyluridine-3'-phosphate
  modified_base 16: mod_base = OTHER; note = 2'-O-methylcytidine-3'-phosphate
  modified_base 17: mod_base = OTHER; note = 2'-O-methyluridine-3'-phosphate
  modified_base 18: mod_base = OTHER; note = 2'-O-methylguanosine-3'-phosphate
  modified_base 20: mod_base = OTHER; note = 2'-O-methyluridine-3'-phosphorothioate
  modified_base 21: mod_base = OTHER; note = 2'-O-methyladenosine-3'-phosphate
tgaaatccgtgagttctgcta

SEQ ID NO: 186511 - RNA, 21 nt, synthetic construct
  source 1..21: mol_type = other RNA
  modified_base 1: mod_base = OTHER; note = 2'-O-methyluridine-3'-phosphate
  modified_base 2: mod_base = OTHER; note = 2'-O-methylguanosine-3'-phosphate
  modified_base 3: mod_base = OTHER; note = 2'-O-methyladenosine-3'-phosphate
  modified_base 4: mod_base = OTHER; note = 2'-O-methyladenosine-3'-phosphate
  modified_base 6: mod_base = OTHER; note = 2'-O-methyluridine-3'-phosphate
  modified_base 7: mod_base = OTHER; note = 2'-O-methylcytidine-3'-phosphate
  modified_base 8: mod_base = OTHER; note = 2'-O-methylcytidine-3'-phosphate
  modified_base 12: mod_base = OTHER; note = 2'-O-methyluridine-3'-phosphate
  modified_base 13: mod_base = OTHER; note = 2'-O-methylguanosine-3'-phosphate
  modified_base 14: mod_base = OTHER; note = 2'-O-methyluridine-3'-phosphate
  modified_base 15: mod_base = OTHER; note = 2'-O-methyluridine-3'-phosphate
  modified_base 16: mod_base = OTHER; note = 2'-O-methylcytidine-3'-phosphate
  modified_base 17: mod_base = OTHER; note = 2'-O-methyluridine-3'-phosphate
  modified_base 18: mod_base = OTHER; note = 2'-O-methylguanosine-3'-phosphate
  modified_base 20: mod_base = OTHER; note = 2'-O-methyluridine-3'-phosphorothioate
  modified_base 21: mod_base = OTHER; note = 2'-O-methyladenosine-3'-phosphate
tgaaatccgtctgttctgcta

SEQ ID NO: 186512 - RNA, 21 nt, synthetic construct
  source 1..21: mol_type = other RNA
  modified_base 1: mod_base = OTHER; note = 2'-O-methyluridine-3'-phosphate
  modified_base 2: mod_base = OTHER; note = 2'-O-methylguanosine-3'-phosphate
  modified_base 3: mod_base = OTHER; note = 2'-O-methyladenosine-3'-phosphate
  modified_base 4: mod_base = OTHER; note = 2'-O-methyladenosine-3'-phosphate
  modified_base 6: mod_base = OTHER; note = 2'-O-methyluridine-3'-phosphate
  modified_base 7: mod_base = OTHER; note = 2'-O-methylcytidine-3'-phosphate
  modified_base 8: mod_base = OTHER; note = 2'-O-methylcytidine-3'-phosphate
  modified_base 12: mod_base = OTHER; note = 2'-O-methyluridine-3'-phosphate
  modified_base 13: mod_base = OTHER; note = 2'-O-methylguanosine-3'-phosphate
  modified_base 14: mod_base = OTHER; note = 2'-O-methyluridine-3'-phosphate
  modified_base 15: mod_base = OTHER; note = 2'-O-methyluridine-3'-phosphate
  modified_base 16: mod_base = OTHER; note = 2'-O-methylcytidine-3'-phosphate
  modified_base 17: mod_base = OTHER; note = 2'-O-methyluridine-3'-phosphate
  modified_base 18: mod_base = OTHER; note = 2'-O-methylguanosine-3'-phosphate
  modified_base 20: mod_base = OTHER; note = 2'-O-methyluridine-3'-phosphorothioate
  modified_base 21: mod_base = OTHER; note = 2'-O-methyladenosine-3'-phosphate
tgaaatccgagtgttctgcta

SEQ ID NO: 186513 - RNA, 21 nt, synthetic construct
  source 1..21: mol_type = other RNA
  modified_base 1: mod_base = OTHER; note = 2'-O-methylcytidine-3'-phosphate
  modified_base 2: mod_base = OTHER; note = 2'-O-methylguanosine-3'-phosphate
  modified_base 3: mod_base = OTHER; note = 2'-O-methyladenosine-3'-phosphate
  modified_base 4: mod_base = OTHER; note = 2'-O-methyladenosine-3'-phosphate
  modified_base 6: mod_base = OTHER; note = 2'-O-methyluridine-3'-phosphate
  modified_base 7: mod_base = OTHER; note = 2'-O-methylcytidine-3'-phosphate
  modified_base 8: mod_base = OTHER; note = 2'-O-methylcytidine-3'-phosphate
  modified_base 12: mod_base = OTHER; note = 2'-O-methyluridine-3'-phosphate
  modified_base 13: mod_base = OTHER; note = 2'-O-methylguanosine-3'-phosphate
  modified_base 14: mod_base = OTHER; note = 2'-O-methyluridine-3'-phosphate
  modified_base 15: mod_base = OTHER; note = 2'-O-methyluridine-3'-phosphate
  modified_base 16: mod_base = OTHER; note = 2'-O-methylcytidine-3'-phosphate
  modified_base 17: mod_base = OTHER; note = 2'-O-methyluridine-3'-phosphate
  modified_base 18: mod_base = OTHER; note = 2'-O-methylguanosine-3'-phosphate
  modified_base 20: mod_base = OTHER; note = 2'-O-methyluridine-3'-phosphorothioate
  modified_base 21: mod_base = OTHER; note = 2'-O-methyladenosine-3'-phosphate
cgaaatccgtgtgttctgcta

SEQ ID NO: 186514 - RNA, 21 nt, synthetic construct
  source 1..21: mol_type = other RNA
  modified_base 1: mod_base = OTHER; note = 2'-O-methyluridine-3'-phosphorothioate
  modified_base 2: mod_base = OTHER; note = 2'-O-methylguanosine-3'-phosphorothioate
  modified_base 3: mod_base = OTHER; note = 2'-O-methyladenosine-3'-phosphate
  modified_base 4: mod_base = OTHER; note = 2'-O-methyladenosine-3'-phosphate
  modified_base 6: mod_base = OTHER; note = 2'-O-methyluridine-3'-phosphate
  modified_base 7: mod_base = OTHER; note = 2'-O-methylcytidine-3'-phosphate
  modified_base 8: mod_base = OTHER; note = 2'-O-methylcytidine-3'-phosphate
  modified_base 12: mod_base = OTHER; note = 2'-O-methyluridine-3'-phosphate
  modified_base 13: mod_base = OTHER; note = 2'-O-methylguanosine-3'-phosphate
  modified_base 14: mod_base = OTHER; note = 2'-O-methyluridine-3'-phosphate
  modified_base 15: mod_base = OTHER; note = 2'-O-methyluridine-3'-phosphate
  modified_base 16: mod_base = OTHER; note = 2'-O-methylcytidine-3'-phosphate
  modified_base 17: mod_base = OTHER; note = 2'-O-methyluridine-3'-phosphate
  modified_base 18: mod_base = OTHER; note = 2'-O-methylguanosine-3'-phosphate
  modified_base 19: mod_base = OTHER; note = cytidine-3'-phosphorothioate
  modified_base 20: mod_base = OTHER; note = 2'-O-methyluridine-3'-phosphorothioate
  modified_base 21: mod_base = OTHER; note = 2'-O-methyladenosine-3'-phosphate
tgaaatccgtgtgttctgcta

SEQ ID NO: 186515 - DNA, 21 bp, synthetic construct
  source 1..21: mol_type = other DNA
  modified_base 1: mod_base = OTHER; note = 2'-O-methyluridine-3'-phosphorothioate
  modified_base 2: mod_base = OTHER; note = 2'-O-methylguanosine-3'-phosphorothioate
  modified_base 3: mod_base = OTHER; note = 2'-O-methyladenosine-3'-phosphate
  modified_base 4: mod_base = OTHER; note = 2'-O-methyladenosine-3'-phosphate
  modified_base 6: mod_base = OTHER; note = 2'-O-methyluridine-3'-phosphate
  modified_base 7: mod_base = OTHER; note = 2'-O-methylcytidine-3'-phosphate
  modified_base 8: mod_base = OTHER; note = 2'-O-methylcytidine-3'-phosphate
  modified_base 12: mod_base = OTHER; note = 2'-O-methyluridine-3'-phosphate
  modified_base 13: mod_base = OTHER; note = 2'-O-methylguanosine-3'-phosphate
  modified_base 14: mod_base = OTHER; note = 2'-O-methyluridine-3'-phosphate
  modified_base 15: mod_base = OTHER; note = 2'-O-methyluridine-3'-phosphate
  modified_base 16: mod_base = OTHER; note = 2'-O-methylcytidine-3'-phosphate
  modified_base 17: mod_base = OTHER; note = 2'-O-methyluridine-3'-phosphate
  modified_base 18: mod_base = OTHER; note = 2'-O-methylguanosine-3'-phosphate
  modified_base 19: mod_base = OTHER; note = 2'-deoxycytidine-3'-phosphorothioate
  modified_base 20: mod_base = OTHER; note = 2'-O-methyluridine-3'-phosphorothioate
  modified_base 21: mod_base = OTHER; note = 2'-O-methyladenosine-3'-phosphate
  misc_feature 1..4: note = RNA
  misc_feature 5: note = DNA
  misc_feature 6..8: note = RNA
  misc_feature 9..11: note = DNA
  misc_feature 12..18: note = RNA
  misc_feature 19: note = DNA
  misc_feature 20..21: note = RNA
tgaaatccgtgtgttctgcta

SEQ ID NO: 186516 - DNA, 21 bp, synthetic construct
  source 1..21: mol_type = other DNA
  modified_base 1: mod_base = OTHER; note = 2'-O-methyluridine-3'-phosphorothioate
  modified_base 2: mod_base = OTHER; note = 2'-O-methyladenosine-3'-phosphorothioate
  modified_base 3: mod_base = OTHER; note = 2'-O-methylcytidine-3'-phosphate
  modified_base 4: mod_base = OTHER; note = 2'-O-methyladenosine-3'-phosphate
  modified_base 5: mod_base = OTHER; note = 2'-O-methyladenosine-3'-phosphate
  modified_base 6: mod_base = OTHER; note = 2'-O-methylguanosine-3'-phosphate
  modified_base 7: mod_base = OTHER; note = 2'-fluorouridine-3'-phosphate
  modified_base 8: mod_base = OTHER; note = 2'-O-methylcytidine-3'-phosphate
  modified_base 9: mod_base = OTHER; note = 2'-fluorocytidine-3'-phosphate
  modified_base 10: mod_base = OTHER; note = 2'-fluoroadenosine-3'-phosphate
  modified_base 12: mod_base = OTHER; note = 2'-O-methylguanosine-3'-phosphate
  modified_base 13: mod_base = OTHER; note = 2'-O-methylguanosine-3'-phosphate
  modified_base 14: mod_base = OTHER; note = 2'-O-methyladenosine-3'-phosphate
  modified_base 15: mod_base = OTHER; note = 2'-O-methyluridine-3'-phosphate
  modified_base 16: mod_base = OTHER; note = 2'-O-methyladenosine-3'-phosphate
  modified_base 17: mod_base = OTHER; note = 2'-O-methyluridine-3'-phosphate
  modified_base 18: mod_base = OTHER; note = 2'-O-methylcytidine-3'-phosphate
  modified_base 19: mod_base = OTHER; note = 2'-O-methylguanosine-3'-phosphate
  modified_base 20: mod_base = OTHER; note = 2'-O-methyluridine-3'-phosphate
  modified_base 21: mod_base = OTHER; note = 2'-O-methyladenosine-3'-phosphate
  misc_feature 1..10: note = RNA
  misc_feature 11: note = DNA
  misc_feature 12..21: note = RNA
tacaagtccatggatatcgta

SEQ ID NO: 186517 - RNA, 21 nt, synthetic construct
  source 1..21: mol_type = other RNA
  modified_base 1: mod_base = OTHER; note = 2'-O-methyluridine-3'-phosphorothioate
  modified_base 2: mod_base = OTHER; note = 2'-O-methyladenosine-3'-phosphorothioate
  modified_base 3: mod_base = OTHER; note = 2'-O-methylcytidine-3'-phosphate
  modified_base 4: mod_base = OTHER; note = 2'-O-methyladenosine-3'-phosphate
  modified_base 5: mod_base = OTHER; note = 2'-O-methyladenosine-3'-phosphate
  modified_base 6: mod_base = OTHER; note = 2'-O-methylguanosine-3'-phosphate
  modified_base 7: mod_base = OTHER; note = 2'-fluorouridine-3'-phosphate
  modified_base 8: mod_base = OTHER; note = 2'-O-methylcytidine-3'-phosphate
  modified_base 9: mod_base = OTHER; note = 2'-fluorocytidine-3'-phosphate
  modified_base 10: mod_base = OTHER; note = 2'-fluoroadenosine-3'-phosphate
  modified_base 11: mod_base = OTHER; note = 2'-fluorouridine-3'-phosphate
  modified_base 12: mod_base = OTHER; note = 2'-O-methylcytidine-3'-phosphate
  modified_base 13: mod_base = OTHER; note = 2'-O-methylguanosine-3'-phosphate
  modified_base 14: mod_base = OTHER; note = 2'-O-methyladenosine-3'-phosphate
  modified_base 15: mod_base = OTHER; note = 2'-O-methyluridine-3'-phosphate
  modified_base 16: mod_base = OTHER; note = 2'-O-methyladenosine-3'-phosphate
  modified_base 17: mod_base = OTHER; note = 2'-O-methyluridine-3'-phosphate
  modified_base 18: mod_base = OTHER; note = 2'-O-methylcytidine-3'-phosphate
  modified_base 19: mod_base = OTHER; note = 2'-O-methylguanosine-3'-phosphate
  modified_base 20: mod_base = OTHER; note = 2'-O-methyluridine-3'-phosphate
  modified_base 21: mod_base = OTHER; note = 2'-O-methyladenosine-3'-phosphate
tacaagtccatcgatatcgta

SEQ ID NO: 186518 - RNA, 21 nt, synthetic construct
  source 1..21: mol_type = other RNA
  modified_base 1: mod_base = OTHER; note = 2'-O-methyluridine-3'-phosphorothioate
  modified_base 2: mod_base = OTHER; note = 2'-O-methyladenosine-3'-phosphorothioate
  modified_base 3: mod_base = OTHER; note = 2'-O-methylcytidine-3'-phosphate
  modified_base 4: mod_base = OTHER; note = 2'-O-methyladenosine-3'-phosphate
  modified_base 5: mod_base = OTHER; note = 2'-O-methyladenosine-3'-phosphate
  modified_base 6: mod_base = OTHER; note = 2'-O-methylguanosine-3'-phosphate
  modified_base 7: mod_base = OTHER; note = 2'-fluorouridine-3'-phosphate
  modified_base 8: mod_base = OTHER; note = 2'-O-methylcytidine-3'-phosphate
  modified_base 9: mod_base = OTHER; note = 2'-fluorocytidine-3'-phosphate
  modified_base 10: mod_base = OTHER; note = 2'-fluoroadenosine-3'-phosphate
  modified_base 11: mod_base = OTHER; note = 2'-fluoroadenosine-3'-phosphate
  modified_base 12: mod_base = OTHER; note = 2'-O-methylguanosine-3'-phosphate
  modified_base 13: mod_base = OTHER; note = 2'-O-methylguanosine-3'-phosphate
  modified_base 14: mod_base = OTHER; note = 2'-O-methyladenosine-3'-phosphate
  modified_base 15: mod_base = OTHER; note = 2'-O-methyluridine-3'-phosphate
  modified_base 16: mod_base = OTHER; note = 2'-O-methyladenosine-3'-phosphate
  modified_base 17: mod_base = OTHER; note = 2'-O-methyluridine-3'-phosphate
  modified_base 18: mod_base = OTHER; note = 2'-O-methylcytidine-3'-phosphate
  modified_base 19: mod_base = OTHER; note = 2'-O-methylguanosine-3'-phosphate
  modified_base 20: mod_base = OTHER; note = 2'-O-methyluridine-3'-phosphate
  modified_base 21: mod_base = OTHER; note = 2'-O-methyladenosine-3'-phosphate
tacaagtccaaggatatcgta

SEQ ID NO: 186519 - RNA, 21 nt, synthetic construct
  source 1..21: mol_type = other RNA
  modified_base 1: mod_base = OTHER; note = 2'-O-methyluridine-3'-phosphorothioate
  modified_base 2: mod_base = OTHER; note = 2'-O-methyladenosine-3'-phosphorothioate
  modified_base 3: mod_base = OTHER; note = 2'-O-methylcytidine-3'-phosphate
  modified_base 4: mod_base = OTHER; note = 2'-O-methyladenosine-3'-phosphate
  modified_base 5: mod_base = OTHER; note = 2'-O-methyladenosine-3'-phosphate
  modified_base 6: mod_base = OTHER; note = 2'-O-methylguanosine-3'-phosphate
  modified_base 7: mod_base = OTHER; note = 2'-fluorouridine-3'-phosphate
  modified_base 8: mod_base = OTHER; note = 2'-O-methylcytidine-3'-phosphate
  modified_base 9: mod_base = OTHER; note = 2'-fluorocytidine-3'-phosphate
  modified_base 10: mod_base = OTHER; note = 2'-fluorouridine-3'-phosphate
  modified_base 11: mod_base = OTHER; note = 2'-fluorouridine-3'-phosphate
  modified_base 12: mod_base = OTHER; note = 2'-O-methylguanosine-3'-phosphate
  modified_base 13: mod_base = OTHER; note = 2'-O-methylguanosine-3'-phosphate
  modified_base 14: mod_base = OTHER; note = 2'-O-methyladenosine-3'-phosphate
  modified_base 15: mod_base = OTHER; note = 2'-O-methyluridine-3'-phosphate
  modified_base 16: mod_base = OTHER; note = 2'-O-methyladenosine-3'-phosphate
  modified_base 17: mod_base = OTHER; note = 2'-O-methyluridine-3'-phosphate
  modified_base 18: mod_base = OTHER; note = 2'-O-methylcytidine-3'-phosphate
  modified_base 19: mod_base = OTHER; note = 2'-O-methylguanosine-3'-phosphate
  modified_base 20: mod_base = OTHER; note = 2'-O-methyluridine-3'-phosphate
  modified_base 21: mod_base = OTHER; note = 2'-O-methyladenosine-3'-phosphate
tacaagtccttggatatcgta

SEQ ID NO: 186520 - RNA, 21 nt, synthetic construct
  source 1..21: mol_type = other RNA
  modified_base 1: mod_base = OTHER; note = 2'-O-methyluridine-3'-phosphorothioate
  modified_base 2: mod_base = OTHER; note = 2'-O-methyladenosine-3'-phosphorothioate
  modified_base 3: mod_base = OTHER; note = 2'-O-methylcytidine-3'-phosphate
  modified_base 4: mod_base = OTHER; note = 2'-O-methyladenosine-3'-phosphate
  modified_base 5: mod_base = OTHER; note = 2'-O-methyladenosine-3'-phosphate
  modified_base 6: mod_base = OTHER; note = 2'-O-methylguanosine-3'-phosphate
  modified_base 7: mod_base = OTHER; note = 2'-fluorouridine-3'-phosphate
  modified_base 8: mod_base = OTHER; note = 2'-O-methylcytidine-3'-phosphate
  modified_base 9: mod_base = OTHER; note = 2'-fluorocytidine-3'-phosphate
  modified_base 10: mod_base = OTHER; note = 2'-fluoroadenosine-3'-phosphate
  modified_base 11: mod_base = OTHER; note = 2'-fluorouridine-3'-phosphate
  modified_base 12: mod_base = OTHER; note = 2'-O-methylguanosine-3'-phosphate
  modified_base 13: mod_base = OTHER; note = 2'-O-methylguanosine-3'-phosphate
  modified_base 14: mod_base = OTHER; note = 2'-O-methyladenosine-3'-phosphate
  modified_base 15: mod_base = OTHER; note = 2'-O-methyluridine-3'-phosphate
  modified_base 16: mod_base = OTHER; note = 2'-O-methyladenosine-3'-phosphate
  modified_base 17: mod_base = OTHER; note = 2'-O-methyluridine-3'-phosphate
  modified_base 18: mod_base = OTHER; note = 2'-O-methylcytidine-3'-phosphate
  modified_base 19: mod_base = OTHER; note = 2'-O-methyladenosine-3'-phosphate
  modified_base 20: mod_base = OTHER; note = 2'-O-methyluridine-3'-phosphate
  modified_base 21: mod_base = OTHER; note = 2'-O-methyladenosine-3'-phosphate
tacaagtccatggatatcata

SEQ ID NO: 186521 - RNA, 21 nt, synthetic construct
  source 1..21: mol_type = other RNA
  modified_base 1: mod_base = OTHER; note = 2'-O-methylcytidine-3'-phosphate
  modified_base 2: mod_base = OTHER; note = 2'-O-methyladenosine-3'-phosphate
  modified_base 3: mod_base = OTHER; note = 2'-O-methyladenosine-3'-phosphate
  modified_base 4: mod_base = OTHER; note = 2'-O-methylguanosine-3'-phosphate
  modified_base 6: mod_base = OTHER; note = 2'-O-methylcytidine-3'-phosphate
  modified_base 7: mod_base = OTHER; note = 2'-O-methylcytidine-3'-phosphate
  modified_base 8: mod_base = OTHER; note = 2'-O-methyladenosine-3'-phosphate
  modified_base 12: mod_base = OTHER; note = 2'-O-methyladenosine-3'-phosphate
  modified_base 13: mod_base = OTHER; note = 2'-O-methyluridine-3'-phosphate
  modified_base 14: mod_base = OTHER; note = 2'-O-methyladenosine-3'-phosphate
  modified_base 15: mod_base = OTHER; note = 2'-O-methyluridine-3'-phosphate
  modified_base 16: mod_base = OTHER; note = 2'-O-methylcytidine-3'-phosphate
  modified_base 17: mod_base = OTHER; note = 2'-O-methyladenosine-3'-phosphate
  modified_base 18: mod_base = OTHER; note = 2'-O-methyluridine-3'-phosphate
  modified_base 20: mod_base = OTHER; note = 2'-O-methylcytidine-3'-phosphorothioate
  modified_base 21: mod_base = OTHER; note = 2'-O-methyladenosine-3'-phosphate
caagtccatggatatcatcca

SEQ ID NO: 186522 - RNA, 21 nt, synthetic construct
  source 1..21: mol_type = other RNA
  modified_base 1: mod_base = OTHER; note = 2'-O-methylcytidine-3'-phosphate
  modified_base 2: mod_base = OTHER; note = 2'-O-methyladenosine-3'-phosphate
  modified_base 3: mod_base = OTHER; note = 2'-O-methyladenosine-3'-phosphate
  modified_base 4: mod_base = OTHER; note = 2'-O-methylguanosine-3'-phosphate
  modified_base 6: mod_base = OTHER; note = 2'-O-methylcytidine-3'-phosphate
  modified_base 7: mod_base = OTHER; note = 2'-O-methylcytidine-3'-phosphate
  modified_base 8: mod_base = OTHER; note = 2'-O-methyladenosine-3'-phosphate
  modified_base 12: mod_base = OTHER; note = 2'-O-methyluridine-3'-phosphate
  modified_base 13: mod_base = OTHER; note = 2'-O-methyluridine-3'-phosphate
  modified_base 14: mod_base = OTHER; note = 2'-O-methyladenosine-3'-phosphate
  modified_base 15: mod_base = OTHER; note = 2'-O-methyluridine-3'-phosphate
  modified_base 16: mod_base = OTHER; note = 2'-O-methylcytidine-3'-phosphate
  modified_base 17: mod_base = OTHER; note = 2'-O-methylguanosine-3'-phosphate
  modified_base 18: mod_base = OTHER; note = 2'-O-methyluridine-3'-phosphate
  modified_base 20: mod_base = OTHER; note = 2'-O-methylcytidine-3'-phosphorothioate
  modified_base 21: mod_base = OTHER; note = 2'-O-methyladenosine-3'-phosphate
caagtccatggttatcgtcca

SEQ ID NO: 186523 - RNA, 21 nt, synthetic construct
  source 1..21: mol_type = other RNA
  modified_base 1: mod_base = OTHER; note = 2'-O-methylcytidine-3'-phosphate
  modified_base 2: mod_base = OTHER; note = 2'-O-methyladenosine-3'-phosphate
  modified_base 3: mod_base = OTHER; note = 2'-O-methyladenosine-3'-phosphate
  modified_base 4: mod_base = OTHER; note = 2'-O-methylguanosine-3'-phosphate
  modified_base 6: mod_base = OTHER; note = 2'-O-methylcytidine-3'-phosphate
  modified_base 7: mod_base = OTHER; note = 2'-O-methylcytidine-3'-phosphate
  modified_base 8: mod_base = OTHER; note = 2'-O-methyladenosine-3'-phosphate
  modified_base 12: mod_base = OTHER; note = 2'-O-methyladenosine-3'-phosphate
  modified_base 13: mod_base = OTHER; note = 2'-O-methyluridine-3'-phosphate
  modified_base 14: mod_base = OTHER; note = 2'-O-methyladenosine-3'-phosphate
  modified_base 15: mod_base = OTHER; note = 2'-O-methyluridine-3'-phosphate
  modified_base 16: mod_base = OTHER; note = 2'-O-methylcytidine-3'-phosphate
  modified_base 17: mod_base = OTHER; note = 2'-O-methylguanosine-3'-phosphate
  modified_base 18: mod_base = OTHER; note = 2'-O-methyluridine-3'-phosphate
  modified_base 20: mod_base = OTHER; note = 2'-O-methylcytidine-3'-phosphorothioate
  modified_base 21: mod_base = OTHER; note = 2'-O-methyladenosine-3'-phosphate
caagtccatgcatatcgtcca

SEQ ID NO: 186524 - RNA, 21 nt, synthetic construct
  source 1..21: mol_type = other RNA
  modified_base 1: mod_base = OTHER; note = 2'-O-methylcytidine-3'-phosphate
  modified_base 2: mod_base = OTHER; note = 2'-O-methyladenosine-3'-phosphate
  modified_base 3: mod_base = OTHER; note = 2'-O-methyladenosine-3'-phosphate
  modified_base 4: mod_base = OTHER; note = 2'-O-methylguanosine-3'-phosphate
  modified_base 6: mod_base = OTHER; note = 2'-O-methylcytidine-3'-phosphate
  modified_base 7: mod_base = OTHER; note = 2'-O-methylcytidine-3'-phosphate
  modified_base 8: mod_base = OTHER; note = 2'-O-methyladenosine-3'-phosphate
  modified_base 12: mod_base = OTHER; note = 2'-O-methyladenosine-3'-phosphate
  modified_base 13: mod_base = OTHER; note = 2'-O-methyluridine-3'-phosphate
  modified_base 14: mod_base = OTHER; note = 2'-O-methyladenosine-3'-phosphate
  modified_base 15: mod_base = OTHER; note = 2'-O-methyluridine-3'-phosphate
  modified_base 16: mod_base = OTHER; note = 2'-O-methylcytidine-3'-phosphate
  modified_base 17: mod_base = OTHER; note = 2'-O-methylguanosine-3'-phosphate
  modified_base 18: mod_base = OTHER; note = 2'-O-methyluridine-3'-phosphate
  modified_base 20: mod_base = OTHER; note = 2'-O-methylcytidine-3'-phosphorothioate
  modified_base 21: mod_base = OTHER; note = 2'-O-methyladenosine-3'-phosphate
caagtccatcgatatcgtcca

SEQ ID NO: 186525 - RNA, 21 nt, synthetic construct
  source 1..21: mol_type = other RNA
  modified_base 1: mod_base = OTHER; note = 2'-O-methylcytidine-3'-phosphate
  modified_base 2: mod_base = OTHER; note = 2'-O-methylguanosine-3'-phosphate
  modified_base 3: mod_base = OTHER; note = 2'-O-methyladenosine-3'-phosphate
  modified_base 4: mod_base = OTHER; note = 2'-O-methylguanosine-3'-phosphate
  modified_base 6: mod_base = OTHER; note = 2'-O-methylcytidine-3'-phosphate
  modified_base 7: mod_base = OTHER; note = 2'-O-methylcytidine-3'-phosphate
  modified_base 8: mod_base = OTHER; note = 2'-O-methyladenosine-3'-phosphate
  modified_base 12: mod_base = OTHER; note = 2'-O-methyladenosine-3'-phosphate
  modified_base 13: mod_base = OTHER; note = 2'-O-methyluridine-3'-phosphate
  modified_base 14: mod_base = OTHER; note = 2'-O-methyladenosine-3'-phosphate
  modified_base 15: mod_base = OTHER; note = 2'-O-methyluridine-3'-phosphate
  modified_base 16: mod_base = OTHER; note = 2'-O-methylcytidine-3'-phosphate
  modified_base 17: mod_base = OTHER; note = 2'-O-methylguanosine-3'-phosphate
  modified_base 18: mod_base = OTHER; note = 2'-O-methyluridine-3'-phosphate
  modified_base 20: mod_base = OTHER; note = 2'-O-methylcytidine-3'-phosphorothioate
  modified_base 21: mod_base = OTHER; note = 2'-O-methyladenosine-3'-phosphate
cgagtccatggatatcgtcca

SEQ ID NO: 186526 - RNA, 21 nt, synthetic construct
  source 1..21: mol_type = other RNA
  modified_base 1: mod_base = OTHER; note = 2'-O-methylcytidine-3'-phosphorothioate
  modified_base 2: mod_base = OTHER; note = 2'-O-methyladenosine-3'-phosphorothioate
  modified_base 3: mod_base = OTHER; note = 2'-O-methyladenosine-3'-phosphate
  modified_base 4: mod_base = OTHER; note = 2'-O-methylguanosine-3'-phosphate
  modified_base 6: mod_base = OTHER; note = 2'-O-methylcytidine-3'-phosphate
  modified_base 7: mod_base = OTHER; note = 2'-O-methylcytidine-3'-phosphate
  modified_base 8: mod_base = OTHER; note = 2'-O-methyladenosine-3'-phosphate
  modified_base 12: mod_base = OTHER; note = 2'-O-methyladenosine-3'-phosphate
  modified_base 13: mod_base = OTHER; note = 2'-O-methyluridine-3'-phosphate
  modified_base 14: mod_base = OTHER; note = 2'-O-methyladenosine-3'-phosphate
  modified_base 15: mod_base = OTHER; note = 2'-O-methyluridine-3'-phosphate
  modified_base 16: mod_base = OTHER; note = 2'-O-methylcytidine-3'-phosphate
  modified_base 17: mod_base = OTHER; note = 2'-O-methylguanosine-3'-phosphate
  modified_base 18: mod_base = OTHER; note = 2'-O-methyluridine-3'-phosphate
  modified_base 19: mod_base = OTHER; note = cytidine-3'-phosphorothioate
  modified_base 20: mod_base = OTHER; note = 2'-O-methylcytidine-3'-phosphorothioate
  modified_base 21: mod_base = OTHER; note = 2'-O-methyladenosine-3'-phosphate
caagtccatggatatcgtcca

SEQ ID NO: 186527 - DNA, 21 bp, synthetic construct
  source 1..21: mol_type = other DNA
  modified_base 1: mod_base = OTHER; note = 2'-O-methylcytidine-3'-phosphorothioate
  modified_base 2: mod_base = OTHER; note = 2'-O-methyladenosine-3'-phosphorothioate
  modified_base 3: mod_base = OTHER; note = 2'-O-methyladenosine-3'-phosphate
  modified_base 4: mod_base = OTHER; note = 2'-O-methylguanosine-3'-phosphate
  modified_base 6: mod_base = OTHER; note = 2'-O-methylcytidine-3'-phosphate
  modified_base 7: mod_base = OTHER; note = 2'-O-methylcytidine-3'-phosphate
  modified_base 8: mod_base = OTHER; note = 2'-O-methyladenosine-3'-phosphate
  modified_base 12: mod_base = OTHER; note = 2'-O-methyladenosine-3'-phosphate
  modified_base 13: mod_base = OTHER; note = 2'-O-methyluridine-3'-phosphate
  modified_base 14: mod_base = OTHER; note = 2'-O-methyladenosine-3'-phosphate
  modified_base 15: mod_base = OTHER; note = 2'-O-methyluridine-3'-phosphate
  modified_base 16: mod_base = OTHER; note = 2'-O-methylcytidine-3'-phosphate
  modified_base 17: mod_base = OTHER; note = 2'-O-methylguanosine-3'-phosphate
  modified_base 18: mod_base = OTHER; note = 2'-O-methyluridine-3'-phosphate
  modified_base 19: mod_base = OTHER; note = 2'-deoxycytidine-3'-phosphorothioate
  modified_base 20: mod_base = OTHER; note = 2'-O-methylcytidine-3'-phosphorothioate
  modified_base 21: mod_base = OTHER; note = 2'-O-methyladenosine-3'-phosphate
  misc_feature 1..4: note = RNA
  misc_feature 5: note = DNA
  misc_feature 6..8: note = RNA
  misc_feature 9..11: note = DNA
  misc_feature 12..18: note = RNA
  misc_feature 19: note = DNA
  misc_feature 20..21: note = RNA
caagtccatggatatcgtcca

SEQ ID NO: 186528 - DNA, 21 bp, synthetic construct
  source 1..21: mol_type = other DNA
  modified_base 1: mod_base = OTHER; note = 2'-O-methylcytidine-3'-phosphorothioate
  modified_base 2: mod_base = OTHER; note = 2'-O-methyluridine-3'-phosphorothioate
  modified_base 3: mod_base = OTHER; note = 2'-O-methylguanosine-3'-phosphate
  modified_base 4: mod_base = OTHER; note = 2'-O-methyluridine-3'-phosphate
  modified_base 5: mod_base = OTHER; note = 2'-O-methyluridine-3'-phosphate
  modified_base 6: mod_base = OTHER; note = 2'-O-methyluridine-3'-phosphate
  modified_base 7: mod_base = OTHER; note = 2'-fluoroguanosine-3'-phosphate
  modified_base 8: mod_base = OTHER; note = 2'-O-methyladenosine-3'-phosphate
  modified_base 9: mod_base = OTHER; note = 2'-fluorocytidine-3'-phosphate
  modified_base 10: mod_base = OTHER; note = 2'-fluorocytidine-3'-phosphate
  modified_base 12: mod_base = OTHER; note = 2'-O-methyladenosine-3'-phosphate
  modified_base 13: mod_base = OTHER; note = 2'-O-methyladenosine-3'-phosphate
  modified_base 14: mod_base = OTHER; note = 2'-O-methyluridine-3'-phosphate
  modified_base 15: mod_base = OTHER; note = 2'-O-methyluridine-3'-phosphate
  modified_base 16: mod_base = OTHER; note = 2'-O-methylcytidine-3'-phosphate
  modified_base 17: mod_base = OTHER; note = 2'-O-methylcytidine-3'-phosphate
  modified_base 18: mod_base = OTHER; note = 2'-O-methylguanosine-3'-phosphate
  modified_base 19: mod_base = OTHER; note = 2'-O-methylguanosine-3'-phosphate
  modified_base 20: mod_base = OTHER; note = 2'-O-methyluridine-3'-phosphate
  modified_base 21: mod_base = OTHER; note = 2'-O-methyladenosine-3'-phosphate
  misc_feature 1..10: note = RNA
  misc_feature 11: note = DNA
  misc_feature 12..21: note = RNA
ctgtttgaccaaattccggta

SEQ ID NO: 186529 - RNA, 21 nt, synthetic construct
  source 1..21: mol_type = other RNA
  modified_base 1: mod_base = OTHER; note = 2'-O-methylcytidine-3'-phosphorothioate
  modified_base 2: mod_base = OTHER; note = 2'-O-methyluridine-3'-phosphorothioate
  modified_base 3: mod_base = OTHER; note = 2'-O-methylguanosine-3'-phosphate
  modified_base 4: mod_base = OTHER; note = 2'-O-methyluridine-3'-phosphate
  modified_base 5: mod_base = OTHER; note = 2'-O-methyluridine-3'-phosphate
  modified_base 6: mod_base = OTHER; note = 2'-O-methyluridine-3'-phosphate
  modified_base 7: mod_base = OTHER; note = 2'-fluoroguanosine-3'-phosphate
  modified_base 8: mod_base = OTHER; note = 2'-O-methyladenosine-3'-phosphate
  modified_base 9: mod_base = OTHER; note = 2'-fluorocytidine-3'-phosphate
  modified_base 10: mod_base = OTHER; note = 2'-fluorocytidine-3'-phosphate
  modified_base 11: mod_base = OTHER; note = 2'-fluoroadenosine-3'-phosphate
  modified_base 12: mod_base = OTHER; note = 2'-O-methyluridine-3'-phosphate
  modified_base 13: mod_base = OTHER; note = 2'-O-methyladenosine-3'-phosphate
  modified_base 14: mod_base = OTHER; note = 2'-O-methyluridine-3'-phosphate
  modified_base 15: mod_base = OTHER; note = 2'-O-methyluridine-3'-phosphate
  modified_base 16: mod_base = OTHER; note = 2'-O-methylcytidine-3'-phosphate
  modified_base 17: mod_base = OTHER; note = 2'-O-methylcytidine-3'-phosphate
  modified_base 18: mod_base = OTHER; note = 2'-O-methylguanosine-3'-phosphate
  modified_base 19: mod_base = OTHER; note = 2'-O-methylguanosine-3'-phosphate
  modified_base 20: mod_base = OTHER; note = 2'-O-methyluridine-3'-phosphate
  modified_base 21: mod_base = OTHER; note = 2'-O-methyladenosine-3'-phosphate
ctgtttgaccatattccggta

SEQ ID NO: 186530 - RNA, 21 nt, synthetic construct
  source 1..21: mol_type = other RNA
  modified_base 1: mod_base = OTHER; note = 2'-O-methylcytidine-3'-phosphorothioate
  modified_base 2: mod_base = OTHER; note = 2'-O-methyluridine-3'-phosphorothioate
  modified_base 3: mod_base = OTHER; note = 2'-O-methylguanosine-3'-phosphate
  modified_base 4: mod_base = OTHER; note = 2'-O-methyluridine-3'-phosphate
  modified_base 5: mod_base = OTHER; note = 2'-O-methyluridine-3'-phosphate
  modified_base 6: mod_base = OTHER; note = 2'-O-methyluridine-3'-phosphate
  modified_base 7: mod_base = OTHER; note = 2'-fluoroguanosine-3'-phosphate
  modified_base 8: mod_base = OTHER; note = 2'-O-methyladenosine-3'-phosphate
  modified_base 9: mod_base = OTHER; note = 2'-fluorocytidine-3'-phosphate
  modified_base 10: mod_base = OTHER; note = 2'-fluorocytidine-3'-phosphate
  modified_base 11: mod_base = OTHER; note = 2'-fluorouridine-3'-phosphate
  modified_base 12: mod_base = OTHER; note = 2'-O-methyladenosine-3'-phosphate
  modified_base 13: mod_base = OTHER; note = 2'-O-methyladenosine-3'-phosphate
  modified_base 14: mod_base = OTHER; note = 2'-O-methyluridine-3'-phosphate
  modified_base 15: mod_base = OTHER; note = 2'-O-methyluridine-3'-phosphate
  modified_base 16: mod_base = OTHER; note = 2'-O-methylcytidine-3'-phosphate
  modified_base 17: mod_base = OTHER; note = 2'-O-methylcytidine-3'-phosphate
  modified_base 18: mod_base = OTHER; note = 2'-O-methylguanosine-3'-phosphate
  modified_base 19: mod_base = OTHER; note = 2'-O-methylguanosine-3'-phosphate
  modified_base 20: mod_base = OTHER; note = 2'-O-methyluridine-3'-phosphate
  modified_base 21: mod_base = OTHER; note = 2'-O-methyladenosine-3'-phosphate
ctgtttgacctaattccggta

SEQ ID NO: 186531 - RNA, 21 nt, synthetic construct
  source 1..21: mol_type = other RNA
  modified_base 1: mod_base = OTHER; note = 2'-O-methylcytidine-3'-phosphorothioate
  modified_base 2: mod_base = OTHER; note = 2'-O-methyluridine-3'-phosphorothioate
  modified_base 3: mod_base = OTHER; note = 2'-O-methylguanosine-3'-phosphate
  modified_base 4: mod_base = OTHER; note = 2'-O-methyluridine-3'-phosphate
  modified_base 5: mod_base = OTHER; note = 2'-O-methyluridine-3'-phosphate
  modified_base 6: mod_base = OTHER; note = 2'-O-methyluridine-3'-phosphate
  modified_base 7: mod_base = OTHER; note = 2'-fluoroguanosine-3'-phosphate
  modified_base 8: mod_base = OTHER; note = 2'-O-methyladenosine-3'-phosphate
  modified_base 9: mod_base = OTHER; note = 2'-fluorocytidine-3'-phosphate
  modified_base 10: mod_base = OTHER; note = 2'-fluoroguanosine-3'-phosphate
  modified_base 11: mod_base = OTHER; note = 2'-fluoroadenosine-3'-phosphate
  modified_base 12: mod_base = OTHER; note = 2'-O-methyladenosine-3'-phosphate
  modified_base 13: mod_base = OTHER; note = 2'-O-methyladenosine-3'-phosphate
  modified_base 14: mod_base = OTHER; note = 2'-O-methyluridine-3'-phosphate
  modified_base 15: mod_base = OTHER; note = 2'-O-methyluridine-3'-phosphate
  modified_base 16: mod_base = OTHER; note = 2'-O-methylcytidine-3'-phosphate
  modified_base 17: mod_base = OTHER; note = 2'-O-methylcytidine-3'-phosphate
  modified_base 18: mod_base = OTHER; note = 2'-O-methylguanosine-3'-phosphate
  modified_base 19: mod_base = OTHER; note = 2'-O-methylguanosine-3'-phosphate
  modified_base 20: mod_base = OTHER; note = 2'-O-methyluridine-3'-phosphate
  modified_base 21: mod_base = OTHER; note = 2'-O-methyladenosine-3'-phosphate
ctgtttgacgaaattccggta

SEQ ID NO: 186532 - RNA, 21 nt, synthetic construct
  source 1..21: mol_type = other RNA
  modified_base 1: mod_base = OTHER; note = 2'-O-methylcytidine-3'-phosphorothioate
  modified_base 2: mod_base = OTHER; note = 2'-O-methyluridine-3'-phosphorothioate
  modified_base 3: mod_base = OTHER; note = 2'-O-methylguanosine-3'-phosphate
  modified_base 4: mod_base = OTHER; note = 2'-O-methyluridine-3'-phosphate
  modified_base 5: mod_base = OTHER; note = 2'-O-methyluridine-3'-phosphate
  modified_base 6: mod_base = OTHER; note = 2'-O-methyluridine-3'-phosphate
  modified_base 7: mod_base = OTHER; note = 2'-fluoroguanosine-3'-phosphate
  modified_base 8: mod_base = OTHER; note = 2'-O-methyladenosine-3'-phosphate
  modified_base 9: mod_base = OTHER; note = 2'-fluorocytidine-3'-phosphate
  modified_base 10: mod_base = OTHER; note = 2'-fluorocytidine-3'-phosphate
  modified_base 11: mod_base = OTHER; note = 2'-fluoroadenosine-3'-phosphate
  modified_base 12: mod_base = OTHER; note = 2'-O-methyladenosine-3'-phosphate
  modified_base 13: mod_base = OTHER; note = 2'-O-methyladenosine-3'-phosphate
  modified_base 14: mod_base = OTHER; note = 2'-O-methyluridine-3'-phosphate
  modified_base 15: mod_base = OTHER; note = 2'-O-methyluridine-3'-phosphate
  modified_base 16: mod_base = OTHER; note = 2'-O-methylcytidine-3'-phosphate
  modified_base 17: mod_base = OTHER; note = 2'-O-methylcytidine-3'-phosphate
  modified_base 18: mod_base = OTHER; note = 2'-O-methylguanosine-3'-phosphate
  modified_base 19: mod_base = OTHER; note = 2'-O-methyladenosine-3'-phosphate
  modified_base 20: mod_base = OTHER; note = 2'-O-methyluridine-3'-phosphate
  modified_base 21: mod_base = OTHER; note = 2'-O-methyladenosine-3'-phosphate
ctgtttgaccaaattccgata

SEQ ID NO: 186533 - DNA, 21 bp, synthetic construct
  source 1..21: mol_type = other DNA
  modified_base 1: mod_base = OTHER; note = 2'-O-methylguanosine-3'-phosphorothioate
  modified_base 2: mod_base = OTHER; note = 2'-O-methylcytidine-3'-phosphorothioate
  modified_base 3: mod_base = OTHER; note = 2'-O-methyluridine-3'-phosphate
  modified_base 4: mod_base = OTHER; note = 2'-O-methyluridine-3'-phosphate
  modified_base 5: mod_base = OTHER; note = 2'-O-methyluridine-3'-phosphate
  modified_base 6: mod_base = OTHER; note = 2'-O-methylguanosine-3'-phosphate
  modified_base 7: mod_base = OTHER; note = 2'-fluorouridine-3'-phosphate
  modified_base 8: mod_base = OTHER; note = 2'-O-methyluridine-3'-phosphate
  modified_base 9: mod_base = OTHER; note = 2'-fluorocytidine-3'-phosphate
  modified_base 10: mod_base = OTHER; note = 2'-fluorocytidine-3'-phosphate
  modified_base 12: mod_base = OTHER; note = 2'-O-methylcytidine-3'-phosphate
  modified_base 13: mod_base = OTHER; note = 2'-O-methylcytidine-3'-phosphate
  modified_base 14: mod_base = OTHER; note = 2'-O-methylcytidine-3'-phosphate
  modified_base 15: mod_base = OTHER; note = 2'-O-methylguanosine-3'-phosphate
  modified_base 16: mod_base = OTHER; note = 2'-O-methyluridine-3'-phosphate
  modified_base 17: mod_base = OTHER; note = 2'-O-methylcytidine-3'-phosphate
  modified_base 18: mod_base = OTHER; note = 2'-O-methyladenosine-3'-phosphate
  modified_base 19: mod_base = OTHER; note = 2'-O-methylcytidine-3'-phosphate
  modified_base 20: mod_base = OTHER; note = 2'-O-methyluridine-3'-phosphate
  modified_base 21: mod_base = OTHER; note = 2'-O-methyladenosine-3'-phosphate
  misc_feature 1..10: note = RNA
  misc_feature 11: note = DNA
  misc_feature 12..21: note = RNA
gctttgttccacccgtcacta

SEQ ID NO: 186534 - RNA, 21 nt, synthetic construct
  source 1..21: mol_type = other RNA
  modified_base 1: mod_base = OTHER; note = 2'-O-methylguanosine-3'-phosphorothioate
  modified_base 2: mod_base = OTHER; note = 2'-O-methylcytidine-3'-phosphorothioate
  modified_base 3: mod_base = OTHER; note = 2'-O-methyluridine-3'-phosphate
  modified_base 4: mod_base = OTHER; note = 2'-O-methyluridine-3'-phosphate
  modified_base 5: mod_base = OTHER; note = 2'-O-methyluridine-3'-phosphate
  modified_base 6: mod_base = OTHER; note = 2'-O-methylguanosine-3'-phosphate
  modified_base 7: mod_base = OTHER; note = 2'-fluorouridine-3'-phosphate
  modified_base 8: mod_base = OTHER; note = 2'-O-methyluridine-3'-phosphate
  modified_base 9: mod_base = OTHER; note = 2'-fluorocytidine-3'-phosphate
  modified_base 10: mod_base = OTHER; note = 2'-fluorocytidine-3'-phosphate
  modified_base 11: mod_base = OTHER; note = 2'-fluoroadenosine-3'-phosphate
  modified_base 12: mod_base = OTHER; note = 2'-O-methylguanosine-3'-phosphate
  modified_base 13: mod_base = OTHER; note = 2'-O-methylcytidine-3'-phosphate
  modified_base 14: mod_base = OTHER; note = 2'-O-methylcytidine-3'-phosphate
  modified_base 15: mod_base = OTHER; note = 2'-O-methylguanosine-3'-phosphate
  modified_base 16: mod_base = OTHER; note = 2'-O-methyluridine-3'-phosphate
  modified_base 17: mod_base = OTHER; note = 2'-O-methylcytidine-3'-phosphate
  modified_base 18: mod_base = OTHER; note = 2'-O-methyladenosine-3'-phosphate
  modified_base 19: mod_base = OTHER; note = 2'-O-methylcytidine-3'-phosphate
  modified_base 20: mod_base = OTHER; note = 2'-O-methyluridine-3'-phosphate
  modified_base 21: mod_base = OTHER; note = 2'-O-methyladenosine-3'-phosphate
gctttgttccagccgtcacta

SEQ ID NO: 186535 - RNA, 21 nt, synthetic construct
  source 1..21: mol_type = other RNA
  modified_base 1: mod_base = OTHER; note = 2'-O-methylguanosine-3'-phosphorothioate
  modified_base 2: mod_base = OTHER; note = 2'-O-methylcytidine-3'-phosphorothioate
  modified_base 3: mod_base = OTHER; note = 2'-O-methyluridine-3'-phosphate
  modified_base 4: mod_base = OTHER; note = 2'-O-methyluridine-3'-phosphate
  modified_base 5: mod_base = OTHER; note = 2'-O-methyluridine-3'-phosphate
  modified_base 6: mod_base = OTHER; note = 2'-O-methylguanosine-3'-phosphate
  modified_base 7: mod_base = OTHER; note = 2'-fluorouridine-3'-phosphate
  modified_base 8: mod_base = OTHER; note = 2'-O-methyluridine-3'-phosphate
  modified_base 9: mod_base = OTHER; note = 2'-fluorocytidine-3'-phosphate
  modified_base 10: mod_base = OTHER; note = 2'-fluorocytidine-3'-phosphate
  modified_base 11: mod_base = OTHER; note = 2'-fluorouridine-3'-phosphate
  modified_base 12: mod_base = OTHER; note = 2'-O-methylcytidine-3'-phosphate
  modified_base 13: mod_base = OTHER; note = 2'-O-methylcytidine-3'-phosphate
  modified_base 14: mod_base = OTHER; note = 2'-O-methylcytidine-3'-phosphate
  modified_base 15: mod_base = OTHER; note = 2'-O-methylguanosine-3'-phosphate
  modified_base 16: mod_base = OTHER; note = 2'-O-methyluridine-3'-phosphate
  modified_base 17: mod_base = OTHER; note = 2'-O-methylcytidine-3'-phosphate
  modified_base 18: mod_base = OTHER; note = 2'-O-methyladenosine-3'-phosphate
  modified_base 19: mod_base = OTHER; note = 2'-O-methylcytidine-3'-phosphate
  modified_base 20: mod_base = OTHER; note = 2'-O-methyluridine-3'-phosphate
  modified_base 21: mod_base = OTHER; note = 2'-O-methyladenosine-3'-phosphate
gctttgttcctcccgtcacta

SEQ ID NO: 186536 - RNA, 21 nt, synthetic construct
  source 1..21: mol_type = other RNA
  modified_base 1: mod_base = OTHER; note = 2'-O-methylguanosine-3'-phosphorothioate
  modified_base 2: mod_base = OTHER; note = 2'-O-methylcytidine-3'-phosphorothioate
  modified_base 3: mod_base = OTHER; note = 2'-O-methyluridine-3'-phosphate
  modified_base 4: mod_base = OTHER; note = 2'-O-methyluridine-3'-phosphate
  modified_base 5: mod_base = OTHER; note = 2'-O-methyluridine-3'-phosphate
  modified_base 6: mod_base = OTHER; note = 2'-O-methylguanosine-3'-phosphate
  modified_base 7: mod_base = OTHER; note = 2'-fluorouridine-3'-phosphate
  modified_base 8: mod_base = OTHER; note = 2'-O-methyluridine-3'-phosphate
  modified_base 9: mod_base = OTHER; note = 2'-fluorocytidine-3'-phosphate
  modified_base 10: mod_base = OTHER; note = 2'-fluoroguanosine-3'-phosphate
  modified_base 11: mod_base = OTHER; note = 2'-fluoroadenosine-3'-phosphate
  modified_base 12: mod_base = OTHER; note = 2'-O-methylcytidine-3'-phosphate
  modified_base 13: mod_base = OTHER; note = 2'-O-methylcytidine-3'-phosphate
  modified_base 14: mod_base = OTHER; note = 2'-O-methylcytidine-3'-phosphate
  modified_base 15: mod_base = OTHER; note = 2'-O-methylguanosine-3'-phosphate
  modified_base 16: mod_base = OTHER; note = 2'-O-methyluridine-3'-phosphate
  modified_base 17: mod_base = OTHER; note = 2'-O-methylcytidine-3'-phosphate
  modified_base 18: mod_base = OTHER; note = 2'-O-methyladenosine-3'-phosphate
  modified_base 19: mod_base = OTHER; note = 2'-O-methylcytidine-3'-phosphate
  modified_base 20: mod_base = OTHER; note = 2'-O-methyluridine-3'-phosphate
  modified_base 21: mod_base = OTHER; note = 2'-O-methyladenosine-3'-phosphate
gctttgttcgacccgtcacta

SEQ ID NO: 186537 - RNA, 21 nt, synthetic construct
  source 1..21: mol_type = other RNA
  modified_base 1: mod_base = OTHER; note = 2'-O-methylguanosine-3'-phosphorothioate
  modified_base 2: mod_base = OTHER; note = 2'-O-methylcytidine-3'-phosphorothioate
  modified_base 3: mod_base = OTHER; note = 2'-O-methyluridine-3'-phosphate
  modified_base 4: mod_base = OTHER; note = 2'-O-methyluridine-3'-phosphate
  modified_base 5: mod_base = OTHER; note = 2'-O-methyluridine-3'-phosphate
  modified_base 6: mod_base = OTHER; note = 2'-O-methylguanosine-3'-phosphate
  modified_base 7: mod_base = OTHER; note = 2'-fluorouridine-3'-phosphate
  modified_base 8: mod_base = OTHER; note = 2'-O-methyluridine-3'-phosphate
  modified_base 9: mod_base = OTHER; note = 2'-fluorocytidine-3'-phosphate
  modified_base 10: mod_base = OTHER; note = 2'-fluorocytidine-3'-phosphate
  modified_base 11: mod_base = OTHER; note = 2'-fluoroadenosine-3'-phosphate
  modified_base 12: mod_base = OTHER; note = 2'-O-methylcytidine-3'-phosphate
  modified_base 13: mod_base = OTHER; note = 2'-O-methylcytidine-3'-phosphate
  modified_base 14: mod_base = OTHER; note = 2'-O-methylcytidine-3'-phosphate
  modified_base 15: mod_base = OTHER; note = 2'-O-methyladenosine-3'-phosphate
  modified_base 16: mod_base = OTHER; note = 2'-O-methyluridine-3'-phosphate
  modified_base 17: mod_base = OTHER; note = 2'-O-methylcytidine-3'-phosphate
  modified_base 18: mod_base = OTHER; note = 2'-O-methyladenosine-3'-phosphate
  modified_base 19: mod_base = OTHER; note = 2'-O-methylcytidine-3'-phosphate
  modified_base 20: mod_base = OTHER; note = 2'-O-methyluridine-3'-phosphate
  modified_base 21: mod_base = OTHER; note = 2'-O-methyladenosine-3'-phosphate
gctttgttccacccatcacta

SEQ ID NO: 186538 - DNA, 21 bp, synthetic construct
  source 1..21: mol_type = other DNA
  modified_base 2: mod_base = OTHER; note = 2'-O-methyladenosine-3'-phosphate
  modified_base 3: mod_base = OTHER; note = 2'-O-methylguanosine-3'-phosphate
  modified_base 4: mod_base = OTHER; note = 2'-O-methylcytidine-3'-phosphate
  modified_base 13: mod_base = OTHER; note = 2'-O-methylcytidine-3'-phosphate
  modified_base 20: mod_base = OTHER; note = 2'-O-methylcytidine-3'-phosphorothioate
  modified_base 21: mod_base = OTHER; note = 2'-O-methyladenosine-3'-phosphate
  misc_feature 1: note = DNA
  misc_feature 2..21: note = RNA
tagcagaacacacggatttca

SEQ ID NO: 186539 - DNA, 21 bp, synthetic construct
  source 1..21: mol_type = other DNA
  modified_base 2: mod_base = OTHER; note = 2'-O-methyladenosine-3'-phosphate
  modified_base 3: mod_base = OTHER; note = 2'-O-methylguanosine-3'-phosphate
  modified_base 4: mod_base = OTHER; note = 2'-O-methylcytidine-3'-phosphate
  modified_base 5: mod_base = OTHER; note = 2'-O-methyladenosine-3'-phosphate
  modified_base 13: mod_base = OTHER; note = 2'-O-methylcytidine-3'-phosphate
  modified_base 20: mod_base = OTHER; note = 2'-O-methylcytidine-3'-phosphorothioate
  modified_base 21: mod_base = OTHER; note = 2'-O-methyladenosine-3'-phosphate
  misc_feature 1: note = DNA
  misc_feature 2..21: note = RNA
tagcagaacacacggatttca

SEQ ID NO: 186540 - DNA, 21 bp, synthetic construct
  source 1..21: mol_type = other DNA
  modified_base 3: mod_base = OTHER; note = 2'-O-methylguanosine-3'-phosphate
  modified_base 4: mod_base = OTHER; note = 2'-O-methylcytidine-3'-phosphate
  modified_base 5: mod_base = OTHER; note = 2'-O-methyladenosine-3'-phosphate
  modified_base 13: mod_base = OTHER; note = 2'-O-methylcytidine-3'-phosphate
  modified_base 20: mod_base = OTHER; note = 2'-O-methylcytidine-3'-phosphorothioate
  modified_base 21: mod_base = OTHER; note = 2'-O-methyladenosine-3'-phosphate
  misc_feature 1: note = DNA
  misc_feature 2..21: note = RNA
tagcagaacacacggatttca

SEQ ID NO: 186541 - DNA, 21 bp, synthetic construct
  source 1..21: mol_type = other DNA
  modified_base 13: mod_base = OTHER; note = 2'-O-methylcytidine-3'-phosphate
  modified_base 20: mod_base = OTHER; note = 2'-O-methylcytidine-3'-phosphorothioate
  modified_base 21: mod_base = OTHER; note = 2'-O-methyladenosine-3'-phosphate
  misc_feature 1: note = DNA
  misc_feature 2..21: note = RNA
tagtagaacacacggatttca

SEQ ID NO: 186542 - DNA, 21 bp, synthetic construct
  source 1..21: mol_type = other DNA
  modified_base 13: mod_base = OTHER; note = 2'-O-methylcytidine-3'-phosphate
  modified_base 20: mod_base = OTHER; note = 2'-O-methylcytidine-3'-phosphorothioate
  modified_base 21: mod_base = OTHER; note = 2'-O-methyladenosine-3'-phosphate
  misc_feature 1: note = DNA
  misc_feature 2..21: note = RNA
tagcagaacacacggattgca

SEQ ID NO: 186543 - DNA, 21 bp, synthetic construct
  source 1..21: mol_type = other DNA
  modified_base 1: mod_base = OTHER; note = 2'-deoxythymidine-3'-phosphorothioate
  modified_base 2: mod_base = OTHER; note = Adenosine-3'-phosphorothioate
  modified_base 13: mod_base = OTHER; note = 2'-O-methylcytidine-3'-phosphate
  modified_base 19: mod_base = OTHER; note = Uridine-3'-phosphorothioate
  modified_base 20: mod_base = OTHER; note = 2'-O-methylcytidine-3'-phosphorothioate
  modified_base 21: mod_base = OTHER; note = 2'-O-methyladenosine-3'-phosphate
  misc_feature 1: note = DNA
  misc_feature 2..21: note = RNA
tagcagaacacacggatttca

SEQ ID NO: 186544 - RNA, 21 nt, synthetic construct
  source 1..21: mol_type = other RNA
  modified_base 1: mod_base = OTHER; note = 5'-vinyl-phosphonate 2'-O-methyluridine-3'-phosphate
  modified_base 13: mod_base = OTHER; note = 2'-O-methylcytidine-3'-phosphate
  modified_base 20: mod_base = OTHER; note = 2'-O-methylcytidine-3'-phosphorothioate
  modified_base 21: mod_base = OTHER; note = 2'-O-methyladenosine-3'-phosphate
tagcagaacacacggatttca

SEQ ID NO: 186545 - DNA, 21 bp, synthetic construct
  source 1..21: mol_type = other DNA
  modified_base 6: mod_base = OTHER; note = Guanosine-glycol nucleic acid (GNA)
  modified_base 13: mod_base = OTHER; note = 2'-O-methylcytidine-3'-phosphate
  modified_base 20: mod_base = OTHER; note = 2'-O-methylcytidine-3'-phosphorothioate
  modified_base 21: mod_base = OTHER; note = 2'-O-methyladenosine-3'-phosphate
  misc_feature 1: note = DNA
  misc_feature 2..21: note = RNA
tagcagaacacacggatttca

SEQ ID NO: 186546 - DNA, 21 bp, synthetic construct
  source 1..21: mol_type = other DNA
  modified_base 7: mod_base = OTHER; note = Adenosine-glycol nucleic acid (GNA)
  modified_base 13: mod_base = OTHER; note = 2'-O-methylcytidine-3'-phosphate
  modified_base 20: mod_base = OTHER; note = 2'-O-methylcytidine-3'-phosphorothioate
  modified_base 21: mod_base = OTHER; note = 2'-O-methyladenosine-3'-phosphate
  misc_feature 1: note = DNA
  misc_feature 2..21: note = RNA
tagcagaacacacggatttca

SEQ ID NO: 186547 - DNA, 21 bp, synthetic construct
  source 1..21: mol_type = other DNA
  modified_base 9: mod_base = OTHER; note = 2'-O-methoxyethylcytidine-3'-phosphate
  modified_base 10: mod_base = OTHER; note = 2'-O-methoxyethyladenosine-3'-phosphate
  modified_base 13: mod_base = OTHER; note = 2'-O-methylcytidine-3'-phosphate
  modified_base 20: mod_base = OTHER; note = 2'-O-methylcytidine-3'-phosphorothioate
  modified_base 21: mod_base = OTHER; note = 2'-O-methyladenosine-3'-phosphate
  misc_feature 1: note = DNA
  misc_feature 2..21: note = RNA
tagcagaacacacggatttca

SEQ ID NO: 186548 - RNA, 21 nt, synthetic construct
  source 1..21: mol_type = other RNA
  modified_base 1: mod_base = OTHER; note = 5'-vinyl-phosphonate 2'-O-methyluridine-3'-phosphorothioate
  modified_base 2: mod_base = OTHER; note = Adenosine-3'-phosphorothioate
  modified_base 13: mod_base = OTHER; note = 2'-O-methylcytidine-3'-phosphate
  modified_base 19: mod_base = OTHER; note = Uridine-3'-phosphorothioate
  modified_base 20: mod_base = OTHER; note = 2'-O-methylcytidine-3'-phosphorothioate
  modified_base 21: mod_base = OTHER; note = 2'-O-methyladenosine-3'-phosphate
tagcagaacacacggatttca

SEQ ID NO: 186549 - RNA, 21 nt, synthetic construct
  source 1..21: mol_type = other RNA
  modified_base 1: mod_base = OTHER; note = 5'-vinyl-phosphonate 2'-O-methyluridine-3'-phosphorothioate
  modified_base 2: mod_base = OTHER; note = Adenosine-3'-phosphorothioate
  modified_base 3: mod_base = OTHER; note = 2'-O-methylguanosine-3'-phosphate
  modified_base 4: mod_base = OTHER; note = 2'-O-methylcytidine-3'-phosphate
  modified_base 5: mod_base = OTHER; note = 2'-O-methyladenosine-3'-phosphate
  modified_base 7: mod_base = OTHER; note = 2'-O-methyladenosine-3'-phosphate
  modified_base 8: mod_base = OTHER; note = 2'-O-methyladenosine-3'-phosphate
  modified_base 9: mod_base = OTHER; note = 2'-O-methylcytidine-3'-phosphate
  modified_base 10: mod_base = OTHER; note = 2'-O-methyladenosine-3'-phosphate
  modified_base 11: mod_base = OTHER; note = 2'-O-methylcytidine-3'-phosphate
  modified_base 12: mod_base = OTHER; note = 2'-O-methyladenosine-3'-phosphate
  modified_base 13: mod_base = OTHER; note = 2'-O-methylcytidine-3'-phosphate
  modified_base 15: mod_base = OTHER; note = 2'-O-methylguanosine-3'-phosphate
  modified_base 17: mod_base = OTHER; note = 2'-O-methyluridine-3'-phosphate
  modified_base 18: mod_base = OTHER; note = 2'-O-methyluridine-3'-phosphate
  modified_base 19: mod_base = OTHER; note = 2'-O-methyluridine-3'-phosphorothioate
  modified_base 20: mod_base = OTHER; note = 2'-O-methylcytidine-3'-phosphorothioate
  modified_base 21: mod_base = OTHER; note = 2'-O-methyladenosine-3'-phosphate
tagcagaacacacggatttca

SEQ ID NO: 186550 - DNA, 21 bp, synthetic construct
  source 1..21: mol_type = other DNA
  modified_base 1: mod_base = OTHER; note = 5'-vinyl-phosphonate 2'-O-methyluridine-3'-phosphorothioate
  modified_base 2: mod_base = OTHER; note = 2'-deoxyadenosine-3'-phosphorothioate
  modified_base 3: mod_base = OTHER; note = 2'-O-methylguanosine-3'-phosphate
  modified_base 4: mod_base = OTHER; note = 2'-O-methylcytidine-3'-phosphate
  modified_base 5: mod_base = OTHER; note = 2'-O-methyladenosine-3'-phosphate
  modified_base 7: mod_base = OTHER; note = 2'-O-methyladenosine-3'-phosphate
  modified_base 8: mod_base = OTHER; note = 2'-O-methyladenosine-3'-phosphate
  modified_base 9: mod_base = OTHER; note = 2'-O-methylcytidine-3'-phosphate
  modified_base 10: mod_base = OTHER; note = 2'-O-methyladenosine-3'-phosphate
  modified_base 11: mod_base = OTHER; note = 2'-O-methylcytidine-3'-phosphate
  modified_base 12: mod_base = OTHER; note = 2'-O-methyladenosine-3'-phosphate
  modified_base 13: mod_base = OTHER; note = 2'-O-methylcytidine-3'-phosphate
  modified_base 15: mod_base = OTHER; note = 2'-O-methylguanosine-3'-phosphate
  modified_base 17: mod_base = OTHER; note = 2'-O-methyluridine-3'-phosphate
  modified_base 18: mod_base = OTHER; note = 2'-O-methyluridine-3'-phosphate
  modified_base 19: mod_base = OTHER; note = 2'-O-methyluridine-3'-phosphorothioate
  modified_base 20: mod_base = OTHER; note = 2'-O-methylcytidine-3'-phosphorothioate
  modified_base 21: mod_base = OTHER; note = 2'-O-methyladenosine-3'-phosphate
  misc_feature 1: note = RNA
  misc_feature 2: note = DNA
  misc_feature 3..5: note = RNA
  misc_feature 6: note = DNA
  misc_feature 7..13: note = RNA
  misc_feature 14: note = DNA
  misc_feature 15: note = RNA
  misc_feature 16: note = DNA
  misc_feature 17..21: note = RNA
tagcagaacacacggatttca

SEQ ID NO: 186551 - DNA, 21 bp, synthetic construct
  source 1..21: mol_type = other DNA
  modified_base 1: mod_base = OTHER; note = 5'-vinyl-phosphonate 2'-O-methyluridine-3'-phosphorothioate
  modified_base 2: mod_base = OTHER; note = 2'-deoxyadenosine-3'-phosphorothioate
  modified_base 3: mod_base = OTHER; note = 2'-O-methylguanosine-3'-phosphate
  modified_base 4: mod_base = OTHER; note = 2'-O-methylcytidine-3'-phosphate
  modified_base 5: mod_base = OTHER; note = 2'-O-methyladenosine-3'-phosphate
  modified_base 7: mod_base = OTHER; note = Adenosine-glycol nucleic acid (GNA)
  modified_base 8: mod_base = OTHER; note = 2'-O-methyladenosine-3'-phosphate
  modified_base 9: mod_base = OTHER; note = 2'-O-methylcytidine-3'-phosphate
  modified_base 10: mod_base = OTHER; note = 2'-O-methyladenosine-3'-phosphate
  modified_base 11: mod_base = OTHER; note = 2'-O-methylcytidine-3'-phosphate
  modified_base 12: mod_base = OTHER; note = 2'-O-methyladenosine-3'-phosphate
  modified_base 13: mod_base = OTHER; note = 2'-O-methylcytidine-3'-phosphate
  modified_base 15: mod_base = OTHER; note = 2'-O-methylguanosine-3'-phosphate
  modified_base 17: mod_base = OTHER; note = 2'-O-methyluridine-3'-phosphate
  modified_base 18: mod_base = OTHER; note = 2'-O-methyluridine-3'-phosphate
  modified_base 19: mod_base = OTHER; note = 2'-O-methyluridine-3'-phosphorothioate
  modified_base 20: mod_base = OTHER; note = 2'-O-methylcytidine-3'-phosphorothioate
  modified_base 21: mod_base = OTHER; note = 2'-O-methyladenosine-3'-phosphate
  misc_feature 1: note = RNA
  misc_feature 2: note = DNA
  misc_feature 3..5: note = RNA
  misc_feature 6: note = DNA
  misc_feature 7..13: note = RNA
  misc_feature 14: note = DNA
  misc_feature 15: note = RNA
  misc_feature 16: note = DNA
  misc_feature 17..21: note = RNA
tagcagaacacacggatttca

SEQ ID NO: 186552 - RNA, 21 nt, synthetic construct
  source 1..21: mol_type = other RNA
  modified_base 1: mod_base = OTHER; note = 5'-vinyl-phosphonate 2'-O-methyluridine-3'-phosphate
  modified_base 2: mod_base = OTHER; note = 2'-O-methyladenosine-3'-phosphate
  modified_base 13: mod_base = OTHER; note = 2'-O-methylcytidine-3'-phosphate
  modified_base 20: mod_base = OTHER; note = 2'-O-methylcytidine-3'-phosphorothioate
  modified_base 21: mod_base = OTHER; note = 2'-O-methyladenosine-3'-phosphate
tagcagaacacacggatttca

SEQ ID NO: 186553 - RNA, 21 nt, synthetic construct
  source 1..21: mol_type = other RNA
  modified_base 1: mod_base = OTHER; note = 5'-vinyl-phosphonate 2'-O-methyluridine-3'-phosphate
  modified_base 7: mod_base = OTHER; note = Adenosine-glycol nucleic acid (GNA)
  modified_base 13: mod_base = OTHER; note = 2'-O-methylcytidine-3'-phosphate
  modified_base 20: mod_base = OTHER; note = 2'-O-methylcytidine-3'-phosphorothioate
  modified_base 21: mod_base = OTHER; note = 2'-O-methyladenosine-3'-phosphate
tagcagaacacacggatttca

SEQ ID NO: 186554 - RNA, 21 nt, synthetic construct
  source 1..21: mol_type = other RNA
  modified_base 1: mod_base = OTHER; note = 5'-vinyl-phosphonate 2'-O-methyluridine-3'-phosphate
  modified_base 3: mod_base = OTHER; note = 2'-O-methylguanosine-3'-phosphate
  modified_base 4: mod_base = OTHER; note = 2'-O-methylcytidine-3'-phosphate
  modified_base 5: mod_base = OTHER; note = 2'-O-methyladenosine-3'-phosphate
  modified_base 7: mod_base = OTHER; note = Adenosine-glycol nucleic acid (GNA)
  modified_base 13: mod_base = OTHER; note = 2'-O-methylcytidine-3'-phosphate
  modified_base 20: mod_base = OTHER; note = 2'-O-methylcytidine-3'-phosphorothioate
  modified_base 21: mod_base = OTHER; note = 2'-O-methyladenosine-3'-phosphate
tagcagaacacacggatttca

SEQ ID NO: 186555 - RNA, 21 nt, synthetic construct
  source 1..21: mol_type = other RNA
  modified_base 1: mod_base = OTHER; note = 5'-vinyl-phosphonate 2'-O-methyluridine-3'-phosphate
  modified_base 3: mod_base = OTHER; note = 2'-O-methylguanosine-3'-phosphate
  modified_base 4: mod_base = OTHER; note = 2'-O-methylcytidine-3'-phosphate
  modified_base 5: mod_base = OTHER; note = 2'-O-methyladenosine-3'-phosphate
  modified_base 7: mod_base = OTHER; note = Adenosine-glycol nucleic acid (GNA)
  modified_base 9: mod_base = OTHER; note = 2'-O-methoxyethylcytidine-3'-phosphate
  modified_base 10: mod_base = OTHER; note = 2'-O-methoxyethyladenosine-3'-phosphate
  modified_base 13: mod_base = OTHER; note = 2'-O-methylcytidine-3'-phosphate
  modified_base 20: mod_base = OTHER; note = 2'-O-methylcytidine-3'-phosphorothioate
  modified_base 21: mod_base = OTHER; note = 2'-O-methyladenosine-3'-phosphate
tagcagaacacacggatttca

SEQ ID NO: 186556 - DNA, 23 bp, synthetic construct
  source 1..23: mol_type = other DNA
  modified_base 2: mod_base = OTHER; note = 2'-O-methyladenosine-3'-phosphate
  modified_base 3: mod_base = OTHER; note = 2'-O-methylguanosine-3'-phosphate
  modified_base 4: mod_base = OTHER; note = 2'-O-methylcytidine-3'-phosphate
  modified_base 13: mod_base = OTHER; note = 2'-O-methylcytidine-3'-phosphate
  modified_base 22: mod_base = OTHER; note = 2'-O-methyluridine-3'-phosphorothioate
  modified_base 23: mod_base = OTHER; note = 2'-O-methyladenosine-3'-phosphate
  misc_feature 1: note = DNA
  misc_feature 2..23: note = RNA
tagcagaacacacggatttcata

SEQ ID NO: 186557 - DNA, 23 bp, synthetic construct
  source 1..23: mol_type = other DNA
  modified_base 2: mod_base = OTHER; note = 2'-O-methyladenosine-3'-phosphate
  modified_base 3: mod_base = OTHER; note = 2'-O-methylguanosine-3'-phosphate
  modified_base 4: mod_base = OTHER; note = 2'-O-methylcytidine-3'-phosphate
  modified_base 5: mod_base = OTHER; note = 2'-O-methyladenosine-3'-phosphate
  modified_base 13: mod_base = OTHER; note = 2'-O-methylcytidine-3'-phosphate
  modified_base 22: mod_base = OTHER; note = 2'-O-methyluridine-3'-phosphorothioate
  modified_base 23: mod_base = OTHER; note = 2'-O-methyladenosine-3'-phosphate
  misc_feature 1: note = DNA
  misc_feature 2..23: note = RNA
tagcagaacacacggatttcata

SEQ ID NO: 186558 - DNA, 23 bp, synthetic construct
  source 1..23: mol_type = other DNA
  modified_base 3: mod_base = OTHER; note = 2'-O-methylguanosine-3'-phosphate
  modified_base 4: mod_base = OTHER; note = 2'-O-methylcytidine-3'-phosphate
  modified_base 5: mod_base = OTHER; note = 2'-O-methyladenosine-3'-phosphate
  modified_base 13: mod_base = OTHER; note = 2'-O-methylcytidine-3'-phosphate
  modified_base 22: mod_base = OTHER; note = 2'-O-methyluridine-3'-phosphorothioate
  modified_base 23: mod_base = OTHER; note = 2'-O-methyladenosine-3'-phosphate
  misc_feature 1: note = DNA
  misc_feature 2..23: note = RNA
tagcagaacacacggatttcata

SEQ ID NO: 186559 - DNA, 23 bp, synthetic construct
  source 1..23: mol_type = other DNA
  modified_base 13: mod_base = OTHER; note = 2'-O-methylcytidine-3'-phosphate
  modified_base 22: mod_base = OTHER; note = 2'-O-methyluridine-3'-phosphorothioate
  modified_base 23: mod_base = OTHER; note = 2'-O-methyladenosine-3'-phosphate
  misc_feature 1: note = DNA
  misc_feature 2..23: note = RNA
tagtagaacacacggatttcata

SEQ ID NO: 186560 - DNA, 23 bp, synthetic construct
  source 1..23: mol_type = other DNA
  modified_base 13: mod_base = OTHER; note = 2'-O-methylcytidine-3'-phosphate
  modified_base 22: mod_base = OTHER; note = 2'-O-methyluridine-3'-phosphorothioate
  modified_base 23: mod_base = OTHER; note = 2'-O-methyladenosine-3'-phosphate
  misc_feature 1: note = DNA
  misc_feature 2..23: note = RNA
tagcagaacacacggatttcgta

SEQ ID NO: 186561 - DNA, 23 bp, synthetic construct
  source 1..23: mol_type = other DNA
  modified_base 1: mod_base = OTHER; note = 2'-deoxythymidine-3'-phosphorothioate
  modified_base 2: mod_base = OTHER; note = Adenosine-3'-phosphorothioate
  modified_base 13: mod_base = OTHER; note = 2'-O-methylcytidine-3'-phosphate
  modified_base 21: mod_base = OTHER; note = Adenosine-3'-phosphorothioate
  modified_base 22: mod_base = OTHER; note = 2'-O-methyluridine-3'-phosphorothioate
  modified_base 23: mod_base = OTHER; note = 2'-O-methyladenosine-3'-phosphate
  misc_feature 1: note = DNA
  misc_feature 2..23: note = RNA
tagcagaacacacggatttcata

SEQ ID NO: 186562 - RNA, 23 nt, synthetic construct
  source 1..23: mol_type = other RNA
  modified_base 1: mod_base = OTHER; note = 5'-vinyl-phosphonate 2'-O-methyluridine-3'-phosphate
  modified_base 13: mod_base = OTHER; note = 2'-O-methylcytidine-3'-phosphate
  modified_base 22: mod_base = OTHER; note = 2'-O-methyluridine-3'-phosphorothioate
  modified_base 23: mod_base = OTHER; note = 2'-O-methyladenosine-3'-phosphate
tagcagaacacacggatttcata

SEQ ID NO: 186563 - DNA, 23 bp, synthetic construct
  source 1..23: mol_type = other DNA
  modified_base 6: mod_base = OTHER; note = Guanosine-glycol nucleic acid (GNA)
  modified_base 13: mod_base = OTHER; note = 2'-O-methylcytidine-3'-phosphate
  modified_base 22: mod_base = OTHER; note = 2'-O-methyluridine-3'-phosphorothioate
  modified_base 23: mod_base = OTHER; note = 2'-O-methyladenosine-3'-phosphate
  misc_feature 1: note = DNA
  misc_feature 2..23: note = RNA
tagcagaacacacggatttcata

SEQ ID NO: 186564 - DNA, 23 bp, synthetic construct
  source 1..23: mol_type = other DNA
  modified_base 7: mod_base = OTHER; note = Adenosine-glycol nucleic acid (GNA)
  modified_base 13: mod_base = OTHER; note = 2'-O-methylcytidine-3'-phosphate
  modified_base 22: mod_base = OTHER; note = 2'-O-methyluridine-3'-phosphorothioate
  modified_base 23: mod_base = OTHER; note = 2'-O-methyladenosine-3'-phosphate
  misc_feature 1: note = DNA
  misc_feature 2..23: note = RNA
tagcagaacacacggatttcata

SEQ ID NO: 186565 - DNA, 23 bp, synthetic construct
  source 1..23: mol_type = other DNA
  modified_base 9: mod_base = OTHER; note = 2'-O-methoxyethylcytidine-3'-phosphate
  modified_base 10: mod_base = OTHER; note = 2'-O-methoxyethyladenosine-3'-phosphate
  modified_base 13: mod_base = OTHER; note = 2'-O-methylcytidine-3'-phosphate
  modified_base 22: mod_base = OTHER; note = 2'-O-methyluridine-3'-phosphorothioate
  modified_base 23: mod_base = OTHER; note = 2'-O-methyladenosine-3'-phosphate
  misc_feature 1: note = DNA
  misc_feature 2..23: note = RNA
tagcagaacacacggatttcata

SEQ ID NO: 186566 - RNA, 23 nt, synthetic construct
  source 1..23: mol_type = other RNA
  modified_base 1: mod_base = OTHER; note = 5'-vinyl-phosphonate 2'-O-methyluridine-3'-phosphorothioate
  modified_base 2: mod_base = OTHER; note = Adenosine-3'-phosphorothioate
  modified_base 13: mod_base = OTHER; note = 2'-O-methylcytidine-3'-phosphate
  modified_base 21: mod_base = OTHER; note = Adenosine-3'-phosphorothioate
  modified_base 22: mod_base = OTHER; note = 2'-O-methyluridine-3'-phosphorothioate
  modified_base 23: mod_base = OTHER; note = 2'-O-methyladenosine-3'-phosphate
tagcagaacacacggatttcata

SEQ ID NO: 186567 - RNA, 23 nt, synthetic construct
  source 1..23: mol_type = other RNA
  modified_base 1: mod_base = OTHER; note = 5'-vinyl-phosphonate 2'-O-methyluridine-3'-phosphorothioate
  modified_base 2: mod_base = OTHER; note = Adenosine-3'-phosphorothioate
  modified_base 3: mod_base = OTHER; note = 2'-O-methylguanosine-3'-phosphate
  modified_base 4: mod_base = OTHER; note = 2'-O-methylcytidine-3'-phosphate
  modified_base 5: mod_base = OTHER; note = 2'-O-methyladenosine-3'-phosphate
  modified_base 7: mod_base = OTHER; note = 2'-O-methyladenosine-3'-phosphate
  modified_base 8: mod_base = OTHER; note = 2'-O-methyladenosine-3'-phosphate
  modified_base 9: mod_base = OTHER; note = 2'-O-methylcytidine-3'-phosphate
  modified_base 10: mod_base = OTHER; note = 2'-O-methyladenosine-3'-phosphate
  modified_base 11: mod_base = OTHER; note = 2'-O-methylcytidine-3'-phosphate
  modified_base 12: mod_base = OTHER; note = 2'-O-methyladenosine-3'-phosphate
  modified_base 13: mod_base = OTHER; note = 2'-O-methylcytidine-3'-phosphate
  modified_base 15: mod_base = OTHER; note = 2'-O-methylguanosine-3'-phosphate
  modified_base 17: mod_base = OTHER; note = 2'-O-methyluridine-3'-phosphate
  modified_base 18: mod_base = OTHER; note = 2'-O-methyluridine-3'-phosphate
  modified_base 19: mod_base = OTHER; note = 2'-O-methyluridine-3'-phosphate
  modified_base 20: mod_base = OTHER; note = 2'-O-methylcytidine-3'-phosphate
  modified_base 21: mod_base = OTHER; note = 2'-O-methyladenosine-3'-phosphorothioate
  modified_base 22: mod_base = OTHER; note = 2'-O-methyluridine-3'-phosphorothioate
  modified_base 23: mod_base = OTHER; note = 2'-O-methyladenosine-3'-phosphate
tagcagaacacacggatttcata

SEQ ID NO: 186568 - DNA, 23 bp, synthetic construct
  source 1..23: mol_type = other DNA
  modified_base 1: mod_base = OTHER; note = 5'-vinyl-phosphonate 2'-O-methyluridine-3'-phosphorothioate
  modified_base 2: mod_base = OTHER; note = 2'-deoxyadenosine-3'-phosphorothioate
  modified_base 3: mod_base = OTHER; note = 2'-O-methylguanosine-3'-phosphate
  modified_base 4: mod_base = OTHER; note = 2'-O-methylcytidine-3'-phosphate
  modified_base 5: mod_base = OTHER; note = 2'-O-methyladenosine-3'-phosphate
  modified_base 7: mod_base = OTHER; note = 2'-O-methyladenosine-3'-phosphate
  modified_base 8: mod_base = OTHER; note = 2'-O-methyladenosine-3'-phosphate
  modified_base 9: mod_base = OTHER; note = 2'-O-methylcytidine-3'-phosphate
  modified_base 10: mod_base = OTHER; note = 2'-O-methyladenosine-3'-phosphate
  modified_base 11: mod_base = OTHER; note = 2'-O-methylcytidine-3'-phosphate
  modified_base 12: mod_base = OTHER; note = 2'-O-methyladenosine-3'-phosphate
  modified_base 13: mod_base = OTHER; note = 2'-O-methylcytidine-3'-phosphate
  modified_base 15: mod_base = OTHER; note = 2'-O-methylguanosine-3'-phosphate
  modified_base 17: mod_base = OTHER; note = 2'-O-methyluridine-3'-phosphate
  modified_base 18: mod_base = OTHER; note = 2'-O-methyluridine-3'-phosphate
  modified_base 19: mod_base = OTHER; note = 2'-O-methyluridine-3'-phosphate
  modified_base 20: mod_base = OTHER; note = 2'-O-methylcytidine-3'-phosphate
  modified_base 21: mod_base = OTHER; note = 2'-O-methyladenosine-3'-phosphorothioate
  modified_base 22: mod_base = OTHER; note = 2'-O-methyluridine-3'-phosphorothioate
  modified_base 23: mod_base = OTHER; note = 2'-O-methyladenosine-3'-phosphate
  misc_feature 1: note = RNA
  misc_feature 2: note = DNA
  misc_feature 3..5: note = RNA
  misc_feature 6: note = DNA
  misc_feature 7..13: note = RNA
  misc_feature 14: note = DNA
  misc_feature 15: note = RNA
  misc_feature 16: note = DNA
  misc_feature 17..23: note = RNA
tagcagaacacacggatttcata

SEQ ID NO: 186569 - DNA, 23 bp, synthetic construct
  source 1..23: mol_type = other DNA
  modified_base 1: mod_base = OTHER; note = 5'-vinyl-phosphonate 2'-O-methyluridine-3'-phosphorothioate
  modified_base 2: mod_base = OTHER; note = 2'-deoxyadenosine-3'-phosphorothioate
  modified_base 3: mod_base = OTHER; note = 2'-O-methylguanosine-3'-phosphate
  modified_base 4: mod_base = OTHER; note = 2'-O-methylcytidine-3'-phosphate
  modified_base 5: mod_base = OTHER; note = 2'-O-methyladenosine-3'-phosphate
  modified_base 7: mod_base = OTHER; note = Adenosine-glycol nucleic acid (GNA)
  modified_base 8: mod_base = OTHER; note = 2'-O-methyladenosine-3'-phosphate
  modified_base 9: mod_base = OTHER; note = 2'-O-methylcytidine-3'-phosphate
  modified_base 10: mod_base = OTHER; note = 2'-O-methyladenosine-3'-phosphate
  modified_base 11: mod_base = OTHER; note = 2'-O-methylcytidine-3'-phosphate
  modified_base 12: mod_base = OTHER; note = 2'-O-methyladenosine-3'-phosphate
  modified_base 13: mod_base = OTHER; note = 2'-O-methylcytidine-3'-phosphate
  modified_base 15: mod_base = OTHER; note = 2'-O-methylguanosine-3'-phosphate
  modified_base 17: mod_base = OTHER; note = 2'-O-methyluridine-3'-phosphate
  modified_base 18: mod_base = OTHER; note = 2'-O-methyluridine-3'-phosphate
  modified_base 19: mod_base = OTHER; note = 2'-O-methyluridine-3'-phosphate
  modified_base 20: mod_base = OTHER; note = 2'-O-methylcytidine-3'-phosphate
  modified_base 21: mod_base = OTHER; note = 2'-O-methyladenosine-3'-phosphorothioate
  modified_base 22: mod_base = OTHER; note = 2'-O-methyluridine-3'-phosphorothioate
  modified_base 23: mod_base = OTHER; note = 2'-O-methyladenosine-3'-phosphate
  misc_feature 1: note = RNA
  misc_feature 2: note = DNA
  misc_feature 3..5: note = RNA
  misc_feature 6: note = DNA
  misc_feature 7..13: note = RNA
  misc_feature 14: note = DNA
  misc_feature 15: note = RNA
  misc_feature 16: note = DNA
  misc_feature 17..23: note = RNA
tagcagaacacacggatttcata

SEQ ID NO: 186570 - RNA, 23 nt, synthetic construct
  source 1..23: mol_type = other RNA
  modified_base 1: mod_base = OTHER; note = 5'-vinyl-phosphonate 2'-O-methyluridine-3'-phosphate
  modified_base 2: mod_base = OTHER; note = 2'-O-methyladenosine-3'-phosphate
  modified_base 13: mod_base = OTHER; note = 2'-O-methylcytidine-3'-phosphate
  modified_base 22: mod_base = OTHER; note = 2'-O-methyluridine-3'-phosphorothioate
  modified_base 23: mod_base = OTHER; note = 2'-O-methyladenosine-3'-phosphate
tagcagaacacacggatttcata

SEQ ID NO: 186571 - RNA, 23 nt, synthetic construct
  source 1..23: mol_type = other RNA
  modified_base 1: mod_base = OTHER; note = 5'-vinyl-phosphonate 2'-O-methyluridine-3'-phosphate
  modified_base 7: mod_base = OTHER; note = Adenosine-glycol nucleic acid (GNA)
  modified_base 13: mod_base = OTHER; note = 2'-O-methylcytidine-3'-phosphate
  modified_base 22: mod_base = OTHER; note = 2'-O-methyluridine-3'-phosphorothioate
  modified_base 23: mod_base = OTHER; note = 2'-O-methyladenosine-3'-phosphate
tagcagaacacacggatttcata

SEQ ID NO: 186572 - RNA, 23 nt, synthetic construct
  source 1..23: mol_type = other RNA
  modified_base 1: mod_base = OTHER; note = 5'-vinyl-phosphonate 2'-O-methyluridine-3'-phosphate
  modified_base 3: mod_base = OTHER; note = 2'-O-methylguanosine-3'-phosphate
  modified_base 4: mod_base = OTHER; note = 2'-O-methylcytidine-3'-phosphate
  modified_base 5: mod_base = OTHER; note = 2'-O-methyladenosine-3'-phosphate
  modified_base 7: mod_base = OTHER; note = Adenosine-glycol nucleic acid (GNA)
  modified_base 13: mod_base = OTHER; note = 2'-O-methylcytidine-3'-phosphate
  modified_base 22: mod_base = OTHER; note = 2'-O-methyluridine-3'-phosphorothioate
  modified_base 23: mod_base = OTHER; note = 2'-O-methyladenosine-3'-phosphate
tagcagaacacacggatttcata

SEQ ID NO: 186573 - RNA, 23 nt, synthetic construct
  source 1..23: mol_type = other RNA
  modified_base 1: mod_base = OTHER; note = 5'-vinyl-phosphonate 2'-O-methyluridine-3'-phosphate
  modified_base 3: mod_base = OTHER; note = 2'-O-methylguanosine-3'-phosphate
  modified_base 4: mod_base = OTHER; note = 2'-O-methylcytidine-3'-phosphate
  modified_base 5: mod_base = OTHER; note = 2'-O-methyladenosine-3'-phosphate
  modified_base 7: mod_base = OTHER; note = Adenosine-glycol nucleic acid (GNA)
  modified_base 9: mod_base = OTHER; note = 2'-O-methoxyethylcytidine-3'-phosphate
  modified_base 10: mod_base = OTHER; note = 2'-O-methoxyethyladenosine-3'-phosphate
  modified_base 13: mod_base = OTHER; note = 2'-O-methylcytidine-3'-phosphate
  modified_base 22: mod_base = OTHER; note = 2'-O-methyluridine-3'-phosphorothioate
  modified_base 23: mod_base = OTHER; note = 2'-O-methyladenosine-3'-phosphate
tagcagaacacacggatttcata

SEQ ID NO: 186574 - RNA, 23 nt, synthetic construct
  source 1..23: mol_type = other RNA
  modified_base 1: mod_base = OTHER; note = 5'-vinyl-phosphonate 2'-O-methyluridine-3'-phosphorothioate
  modified_base 2: mod_base = OTHER; note = 2'-fluoroadenosine-3'-phosphorothioate
  modified_base 3: mod_base = OTHER; note = 2'-O-methylcytidine-3'-phosphate
  modified_base 4: mod_base = OTHER; note = 2'-O-methylguanosine-3'-phosphate
  modified_base 5: mod_base = OTHER; note = 2'-O-methyladenosine-3'-phosphate
  modified_base 6: mod_base = OTHER; note = 2'-fluorouridine-3'-phosphate
  modified_base 7: mod_base = OTHER; note = 2'-O-methyladenosine-3'-phosphate
  modified_base 8: mod_base = OTHER; note = 2'-O-methyluridine-3'-phosphate
  modified_base 9: mod_base = OTHER; note = 2'-O-methylcytidine-3'-phosphate
  modified_base 10: mod_base = OTHER; note = 2'-O-methylcytidine-3'-phosphate
  modified_base 11: mod_base = OTHER; note = 2'-O-methyladenosine-3'-phosphate
  modified_base 12: mod_base = OTHER; note = 2'-O-methyluridine-3'-phosphate
  modified_base 13: mod_base = OTHER; note = 2'-O-methylguanosine-3'-phosphate
  modified_base 14: mod_base = OTHER; note = 2'-fluoroguanosine-3'-phosphate
  modified_base 15: mod_base = OTHER; note = 2'-O-methyladenosine-3'-phosphate
  modified_base 16: mod_base = OTHER; note = 2'-fluorocytidine-3'-phosphate
  modified_base 17: mod_base = OTHER; note = 2'-O-methyluridine-3'-phosphate
  modified_base 18: mod_base = OTHER; note = 2'-O-methyluridine-3'-phosphate
  modified_base 19: mod_base = OTHER; note = 2'-O-methylguanosine-3'-phosphate
  modified_base 20: mod_base = OTHER; note = 2'-O-methyluridine-3'-phosphate
  modified_base 21: mod_base = OTHER; note = 2'-O-methyladenosine-3'-phosphorothioate
  modified_base 22: mod_base = OTHER; note = 2'-O-methylguanosine-3'-phosphorothioate
  modified_base 23: mod_base = OTHER; note = 2'-O-methyluridine-3'-phosphate
tacgatatccatggacttgtagt

SEQ ID NO: 186575 - RNA, 23 nt, synthetic construct
  source 1..23: mol_type = other RNA
  modified_base 1: mod_base = OTHER; note = 2'-O-methyluridine-3'-phosphorothioate
  modified_base 2: mod_base = OTHER; note = 2'-fluoroadenosine-3'-phosphorothioate
  modified_base 3: mod_base = OTHER; note = 2'-O-methylcytidine-3'-phosphate
  modified_base 4: mod_base = OTHER; note = 2'-O-methylguanosine-3'-phosphate
  modified_base 5: mod_base = OTHER; note = 2'-O-methyladenosine-3'-phosphate
  modified_base 6: mod_base = OTHER; note = Thymidine-glycol nucleic acid (GNA) S-Isomer
  modified_base 7: mod_base = OTHER; note = 2'-O-methyladenosine-3'-phosphate
  modified_base 8: mod_base = OTHER; note = 2'-O-methyluridine-3'-phosphate
  modified_base 9: mod_base = OTHER; note = 2'-O-methylcytidine-3'-phosphate
  modified_base 10: mod_base = OTHER; note = 2'-O-methylcytidine-3'-phosphate
  modified_base 11: mod_base = OTHER; note = 2'-O-methyladenosine-3'-phosphate
  modified_base 12: mod_base = OTHER; note = 2'-O-methyluridine-3'-phosphate
  modified_base 13: mod_base = OTHER; note = 2'-O-methylguanosine-3'-phosphate
  modified_base 14: mod_base = OTHER; note = 2'-fluoroguanosine-3'-phosphate
  modified_base 15: mod_base = OTHER; note = 2'-O-methyladenosine-3'-phosphate
  modified_base 16: mod_base = OTHER; note = 2'-fluorocytidine-3'-phosphate
  modified_base 17: mod_base = OTHER; note = 2'-O-methyluridine-3'-phosphate
  modified_base 18: mod_base = OTHER; note = 2'-O-methyluridine-3'-phosphate
  modified_base 19: mod_base = OTHER; note = 2'-O-methylguanosine-3'-phosphate
  modified_base 20: mod_base = OTHER; note = 2'-O-methyluridine-3'-phosphate
  modified_base 21: mod_base = OTHER; note = 2'-O-methyladenosine-3'-phosphorothioate
  modified_base 22: mod_base = OTHER; note = 2'-O-methylguanosine-3'-phosphorothioate
  modified_base 23: mod_base = OTHER; note = 2'-O-methyluridine-3'-phosphate
tacgatatccatggacttgtagt

SEQ ID NO: 186576 - RNA, 23 nt, synthetic construct
  source 1..23: mol_type = other RNA
  modified_base 1: mod_base = OTHER; note = 2'-O-methyluridine-3'-phosphorothioate
  modified_base 2: mod_base = OTHER; note = 2'-fluoroadenosine-3'-phosphorothioate
  modified_base 3: mod_base = OTHER; note = 2'-O-methylcytidine-3'-phosphate
  modified_base 4: mod_base = OTHER; note = 2'-O-methylguanosine-3'-phosphate
  modified_base 5: mod_base = OTHER; note = 2'-O-methyladenosine-3'-phosphate
  modified_base 6: mod_base = OTHER; note = 2'-fluorouridine-3'-phosphate
  modified_base 7: mod_base = OTHER; note = Adenosine-glycol nucleic acid (GNA)
  modified_base 8: mod_base = OTHER; note = 2'-O-methyluridine-3'-phosphate
  modified_base 9: mod_base = OTHER; note = 2'-O-methylcytidine-3'-phosphate
  modified_base 10: mod_base = OTHER; note = 2'-O-methylcytidine-3'-phosphate
  modified_base 11: mod_base = OTHER; note = 2'-O-methyladenosine-3'-phosphate
  modified_base 12: mod_base = OTHER; note = 2'-O-methyluridine-3'-phosphate
  modified_base 13: mod_base = OTHER; note = 2'-O-methylguanosine-3'-phosphate
  modified_base 14: mod_base = OTHER; note = 2'-fluoroguanosine-3'-phosphate
  modified_base 15: mod_base = OTHER; note = 2'-O-methyladenosine-3'-phosphate
  modified_base 16: mod_base = OTHER; note = 2'-fluorocytidine-3'-phosphate
  modified_base 17: mod_base = OTHER; note = 2'-O-methyluridine-3'-phosphate
  modified_base 18: mod_base = OTHER; note = 2'-O-methyluridine-3'-phosphate
  modified_base 19: mod_base = OTHER; note = 2'-O-methylguanosine-3'-phosphate
  modified_base 20: mod_base = OTHER; note = 2'-O-methyluridine-3'-phosphate
  modified_base 21: mod_base = OTHER; note = 2'-O-methyladenosine-3'-phosphorothioate
  modified_base 22: mod_base = OTHER; note = 2'-O-methylguanosine-3'-phosphorothioate
  modified_base 23: mod_base = OTHER; note = 2'-O-methyluridine-3'-phosphate
tacgatatccatggacttgtagt

SEQ ID NO: 186577 - RNA, 23 nt, synthetic construct
  source 1..23: mol_type = other RNA
  modified_base 1: mod_base = OTHER; note = 2'-O-methyluridine-3'-phosphorothioate
  modified_base 2: mod_base = OTHER; note = 2'-fluoroadenosine-3'-phosphorothioate
  modified_base 3: mod_base = OTHER; note = 2'-O-methyluridine-3'-phosphate
  modified_base 4: mod_base = OTHER; note = 2'-O-methylguanosine-3'-phosphate
  modified_base 5: mod_base = OTHER; note = 2'-O-methyladenosine-3'-phosphate
  modified_base 6: mod_base = OTHER; note = 2'-fluorouridine-3'-phosphate
  modified_base 7: mod_base = OTHER; note = 2'-O-methyladenosine-3'-phosphate
  modified_base 8: mod_base = OTHER; note = 2'-O-methyluridine-3'-phosphate
  modified_base 9: mod_base = OTHER; note = 2'-O-methylcytidine-3'-phosphate
  modified_base 10: mod_base = OTHER; note = 2'-O-methylcytidine-3'-phosphate
  modified_base 11: mod_base = OTHER; note = 2'-O-methyladenosine-3'-phosphate
  modified_base 12: mod_base = OTHER; note = 2'-O-methyluridine-3'-phosphate
  modified_base 13: mod_base = OTHER; note = 2'-O-methylguanosine-3'-phosphate
  modified_base 14: mod_base = OTHER; note = 2'-fluoroguanosine-3'-phosphate
  modified_base 15: mod_base = OTHER; note = 2'-O-methyladenosine-3'-phosphate
  modified_base 16: mod_base = OTHER; note = 2'-fluorocytidine-3'-phosphate
  modified_base 17: mod_base = OTHER; note = 2'-O-methyluridine-3'-phosphate
  modified_base 18: mod_base = OTHER; note = 2'-O-methyluridine-3'-phosphate
  modified_base 19: mod_base = OTHER; note = 2'-O-methylguanosine-3'-phosphate
  modified_base 20: mod_base = OTHER; note = 2'-O-methyluridine-3'-phosphate
  modified_base 21: mod_base = OTHER; note = 2'-O-methyladenosine-3'-phosphorothioate
  modified_base 22: mod_base = OTHER; note = 2'-O-methylguanosine-3'-phosphorothioate
  modified_base 23: mod_base = OTHER; note = 2'-O-methyluridine-3'-phosphate
tatgatatccatggacttgtagt

SEQ ID NO: 186578 - RNA, 23 nt, synthetic construct
  source 1..23: mol_type = other RNA
  modified_base 1: mod_base = OTHER; note = 2'-O-methyluridine-3'-phosphorothioate
  modified_base 2: mod_base = OTHER; note = 2'-fluoroadenosine-3'-phosphorothioate
  modified_base 3: mod_base = OTHER; note = 2'-O-methylcytidine-3'-phosphate
  modified_base 4: mod_base = OTHER; note = 2'-O-methylguanosine-3'-phosphate
  modified_base 5: mod_base = OTHER; note = 2'-O-methyladenosine-3'-phosphate
  modified_base 6: mod_base = OTHER; note = 2'-fluorouridine-3'-phosphate
  modified_base 7: mod_base = OTHER; note = 2'-O-methyladenosine-3'-phosphate
  modified_base 8: mod_base = OTHER; note = 2'-O-methyluridine-3'-phosphate
  modified_base 9: mod_base = OTHER; note = 2'-O-methylcytidine-3'-phosphate
  modified_base 10: mod_base = OTHER; note = 2'-O-methylcytidine-3'-phosphate
  modified_base 11: mod_base = OTHER; note = 2'-O-methyladenosine-3'-phosphate
  modified_base 12: mod_base = OTHER; note = 2'-O-methyluridine-3'-phosphate
  modified_base 13: mod_base = OTHER; note = 2'-O-methylguanosine-3'-phosphate
  modified_base 14: mod_base = OTHER; note = 2'-fluoroguanosine-3'-phosphate
  modified_base 15: mod_base = OTHER; note = 2'-O-methyladenosine-3'-phosphate
  modified_base 16: mod_base = OTHER; note = 2'-fluorocytidine-3'-phosphate
  modified_base 17: mod_base = OTHER; note = 2'-O-methyluridine-3'-phosphate
  modified_base 18: mod_base = OTHER; note = 2'-O-methyluridine-3'-phosphate
  modified_base 19: mod_base = OTHER; note = 2'-O-methylguanosine-3'-phosphate
  modified_base 20: mod_base = OTHER; note = 2'-O-methyluridine-3'-phosphate
  modified_base 21: mod_base = OTHER; note = 2'-O-methyladenosine-3'-phosphorothioate
  modified_base 22: mod_base = OTHER; note = 2'-O-methoxyethylguanosine-3'-phosphorothioate
  modified_base 23: mod_base = OTHER; note = 2'-O-methoxyethyl-5-methyluridine-3'-phosphate
tacgatatccatggacttgtagt

SEQ ID NO: 186579 - RNA, 23 nt, synthetic construct
  source 1..23: mol_type = other RNA
  modified_base 1: mod_base = OTHER; note = 5'-vinyl-phosphonate 2'-O-methyluridine-3'-phosphorothioate
  modified_base 2: mod_base = OTHER; note = 2'-O-methyladenosine-3'-phosphorothioate
  modified_base 3: mod_base = OTHER; note = 2'-O-methylcytidine-3'-phosphate
  modified_base 4: mod_base = OTHER; note = 2'-O-methylguanosine-3'-phosphate
  modified_base 5: mod_base = OTHER; note = 2'-O-methyladenosine-3'-phosphate
  modified_base 6: mod_base = OTHER; note = 2'-fluorouridine-3'-phosphate
  modified_base 7: mod_base = OTHER; note = 2'-O-methyladenosine-3'-phosphate
  modified_base 8: mod_base = OTHER; note = 2'-O-methyluridine-3'-phosphate
  modified_base 9: mod_base = OTHER; note = 2'-O-methylcytidine-3'-phosphate
  modified_base 10: mod_base = OTHER; note = 2'-O-methylcytidine-3'-phosphate
  modified_base 11: mod_base = OTHER; note = 2'-O-methyladenosine-3'-phosphate
  modified_base 12: mod_base = OTHER; note = 2'-O-methyluridine-3'-phosphate
  modified_base 13: mod_base = OTHER; note = 2'-O-methylguanosine-3'-phosphate
  modified_base 14: mod_base = OTHER; note = 2'-fluoroguanosine-3'-phosphate
  modified_base 15: mod_base = OTHER; note = 2'-O-methyladenosine-3'-phosphate
  modified_base 16: mod_base = OTHER; note = 2'-fluorocytidine-3'-phosphate
  modified_base 17: mod_base = OTHER; note = 2'-O-methyluridine-3'-phosphate
  modified_base 18: mod_base = OTHER; note = 2'-O-methyluridine-3'-phosphate
  modified_base 19: mod_base = OTHER; note = 2'-O-methylguanosine-3'-phosphate
  modified_base 20: mod_base = OTHER; note = 2'-O-methyluridine-3'-phosphate
  modified_base 21: mod_base = OTHER; note = 2'-O-methyladenosine-3'-phosphorothioate
  modified_base 22: mod_base = OTHER; note = 2'-O-methylguanosine-3'-phosphorothioate
  modified_base 23: mod_base = OTHER; note = 2'-O-methyluridine-3'-phosphate
tacgatatccatggacttgtagt

SEQ ID NO: 186580 - RNA, 23 nt, synthetic construct
  source 1..23: mol_type = other RNA
  modified_base 1: mod_base = OTHER; note = 2'-O-methyluridine-3'-phosphorothioate
  modified_base 2: mod_base = OTHER; note = 2'-fluoroadenosine-3'-phosphorothioate
  modified_base 3: mod_base = OTHER; note = 2'-O-methylcytidine-3'-phosphate
  modified_base 4: mod_base = OTHER; note = 2'-O-methylguanosine-3'-phosphate
  modified_base 5: mod_base = OTHER; note = 2'-O-methyladenosine-3'-phosphate
  modified_base 6: mod_base = OTHER; note = Abasic nucleotide
  modified_base 7: mod_base = OTHER; note = 2'-O-methyladenosine-3'-phosphate
  modified_base 8: mod_base = OTHER; note = 2'-O-methyluridine-3'-phosphate
  modified_base 9: mod_base = OTHER; note = 2'-O-methylcytidine-3'-phosphate
  modified_base 10: mod_base = OTHER; note = 2'-O-methylcytidine-3'-phosphate
  modified_base 11: mod_base = OTHER; note = 2'-O-methyladenosine-3'-phosphate
  modified_base 12: mod_base = OTHER; note = 2'-O-methyluridine-3'-phosphate
  modified_base 13: mod_base = OTHER; note = 2'-O-methylguanosine-3'-phosphate
  modified_base 14: mod_base = OTHER; note = 2'-fluoroguanosine-3'-phosphate
  modified_base 15: mod_base = OTHER; note = 2'-O-methyladenosine-3'-phosphate
  modified_base 16: mod_base = OTHER; note = 2'-fluorocytidine-3'-phosphate
  modified_base 17: mod_base = OTHER; note = 2'-O-methyluridine-3'-phosphate
  modified_base 18: mod_base = OTHER; note = 2'-O-methyluridine-3'-phosphate
  modified_base 19: mod_base = OTHER; note = 2'-O-methylguanosine-3'-phosphate
  modified_base 20: mod_base = OTHER; note = 2'-O-methyluridine-3'-phosphate
  modified_base 21: mod_base = OTHER; note = 2'-O-methyladenosine-3'-phosphorothioate
  modified_base 22: mod_base = OTHER; note = 2'-O-methylguanosine-3'-phosphorothioate
  modified_base 23: mod_base = OTHER; note = 2'-O-methyluridine-3'-phosphate
tacganatccatggacttgtagt

SEQ ID NO: 186581 - RNA, 23 nt, synthetic construct
  source 1..23: mol_type = other RNA
  modified_base 1: mod_base = OTHER; note = 2'-O-methyluridine-3'-phosphorothioate
  modified_base 2: mod_base = OTHER; note = 2'-fluoroadenosine-3'-phosphorothioate
  modified_base 3: mod_base = OTHER; note = 2'-O-methylcytidine-3'-phosphate
  modified_base 4: mod_base = OTHER; note = 2'-O-methylguanosine-3'-phosphate
  modified_base 5: mod_base = OTHER; note = 2'-O-methyladenosine-3'-phosphate
  modified_base 6: mod_base = OTHER; note = Abasic nucleotide
  modified_base 7: mod_base = OTHER; note = 2'-O-methyladenosine-3'-phosphate
  modified_base 8: mod_base = OTHER; note = 2'-O-methyluridine-3'-phosphate
  modified_base 9: mod_base = OTHER; note = 2'-O-methylcytidine-3'-phosphate
  modified_base 10: mod_base = OTHER; note = 2'-O-methylcytidine-3'-phosphate
  modified_base 11: mod_base = OTHER; note = 2'-O-methyladenosine-3'-phosphate
  modified_base 12: mod_base = OTHER; note = 2'-O-methyluridine-3'-phosphate
  modified_base 13: mod_base = OTHER; note = 2'-O-methylguanosine-3'-phosphate
  modified_base 14: mod_base = OTHER; note = 2'-fluoroguanosine-3'-phosphate
  modified_base 15: mod_base = OTHER; note = 2'-O-methyladenosine-3'-phosphate
  modified_base 16: mod_base = OTHER; note = 2'-fluorocytidine-3'-phosphate
  modified_base 17: mod_base = OTHER; note = 2'-O-methyluridine-3'-phosphate
  modified_base 18: mod_base = OTHER; note = 2'-O-methyluridine-3'-phosphate
  modified_base 19: mod_base = OTHER; note = 2'-O-methylguanosine-3'-phosphate
  modified_base 20: mod_base = OTHER; note = 2'-O-methyluridine-3'-phosphate
  modified_base 21: mod_base = OTHER; note = 2'-O-methyladenosine-3'-phosphorothioate
  modified_base 22: mod_base = OTHER; note = 2'-O-methylguanosine-3'-phosphorothioate
  modified_base 23: mod_base = OTHER; note = 2'-O-methyluridine-3'-phosphate
tacganatccatggacttgtagt

SEQ ID NO: 186582 - RNA, 17 nt, synthetic construct
  source 1..17: mol_type = other RNA
  modified_base 1: mod_base = OTHER; note = 2'-O-methyladenosine-3'-phosphate
  modified_base 2: mod_base = OTHER; note = 2'-O-methyluridine-3'-phosphate
  modified_base 3: mod_base = OTHER; note = 2'-O-methylcytidine-3'-phosphate
  modified_base 4: mod_base = OTHER; note = 2'-O-methylcytidine-3'-phosphate
  modified_base 5: mod_base = OTHER; note = 2'-O-methyladenosine-3'-phosphate
  modified_base 6: mod_base = OTHER; note = 2'-O-methyluridine-3'-phosphate
  modified_base 7: mod_base = OTHER; note = 2'-O-methylguanosine-3'-phosphate
  modified_base 8: mod_base = OTHER; note = 2'-fluoroguanosine-3'-phosphate
  modified_base 9: mod_base = OTHER; note = 2'-O-methyladenosine-3'-phosphate
  modified_base 10: mod_base = OTHER; note = 2'-fluorocytidine-3'-phosphate
  modified_base 11: mod_base = OTHER; note = 2'-O-methyluridine-3'-phosphate
  modified_base 12: mod_base = OTHER; note = 2'-O-methyluridine-3'-phosphate
  modified_base 13: mod_base = OTHER; note = 2'-O-methylguanosine-3'-phosphate
  modified_base 14: mod_base = OTHER; note = 2'-O-methyluridine-3'-phosphate
  modified_base 15: mod_base = OTHER; note = 2'-O-methyladenosine-3'-phosphorothioate
  modified_base 16: mod_base = OTHER; note = 2'-O-methylguanosine-3'-phosphorothioate
  modified_base 17: mod_base = OTHER; note = 2'-O-methyluridine-3'-phosphate
atccatggacttgtagt

SEQ ID NO: 186583 - RNA, 23 nt, synthetic construct
  source 1..23: mol_type = other RNA
  modified_base 1: mod_base = OTHER; note = 2'-O-methyluridine-3'-phosphorothioate
  modified_base 2: mod_base = OTHER; note = 2'-fluoroadenosine-3'-phosphorothioate
  modified_base 3: mod_base = OTHER; note = 2'-O-methylcytidine-3'-phosphate
  modified_base 4: mod_base = OTHER; note = 2'-O-methylguanosine-3'-phosphate
  modified_base 5: mod_base = OTHER; note = 2'-O-methyladenosine-3'-phosphate
  modified_base 6: mod_base = OTHER; note = 2'-O-methyl modified abasic nucleotide
  modified_base 7: mod_base = OTHER; note = 2'-O-methyladenosine-3'-phosphate
  modified_base 8: mod_base = OTHER; note = 2'-O-methyluridine-3'-phosphate
  modified_base 9: mod_base = OTHER; note = 2'-O-methylcytidine-3'-phosphate
  modified_base 10: mod_base = OTHER; note = 2'-O-methylcytidine-3'-phosphate
  modified_base 11: mod_base = OTHER; note = 2'-O-methyladenosine-3'-phosphate
  modified_base 12: mod_base = OTHER; note = 2'-O-methyluridine-3'-phosphate
  modified_base 13: mod_base = OTHER; note = 2'-O-methylguanosine-3'-phosphate
  modified_base 14: mod_base = OTHER; note = 2'-fluoroguanosine-3'-phosphate
  modified_base 15: mod_base = OTHER; note = 2'-O-methyladenosine-3'-phosphate
  modified_base 16: mod_base = OTHER; note = 2'-fluorocytidine-3'-phosphate
  modified_base 17: mod_base = OTHER; note = 2'-O-methyluridine-3'-phosphate
  modified_base 18: mod_base = OTHER; note = 2'-O-methyluridine-3'-phosphate
  modified_base 19: mod_base = OTHER; note = 2'-O-methylguanosine-3'-phosphate
  modified_base 20: mod_base = OTHER; note = 2'-O-methyluridine-3'-phosphate
  modified_base 21: mod_base = OTHER; note = 2'-O-methyladenosine-3'-phosphorothioate
  modified_base 22: mod_base = OTHER; note = 2'-O-methylguanosine-3'-phosphorothioate
  modified_base 23: mod_base = OTHER; note = 2'-O-methyluridine-3'-phosphate
tacganatccatggacttgtagt

SEQ ID NO: 186584 - RNA, 23 nt, synthetic construct
  source 1..23: mol_type = other RNA
  modified_base 1: mod_base = OTHER; note = 2'-O-methyluridine-3'-phosphorothioate
  modified_base 2: mod_base = OTHER; note = 2'-fluoroadenosine-3'-phosphorothioate
  modified_base 3: mod_base = OTHER; note = 2'-O-methylcytidine-3'-phosphate
  modified_base 4: mod_base = OTHER; note = 2'-O-methylguanosine-3'-phosphate
  modified_base 5: mod_base = OTHER; note = 2'-O-methyladenosine-3'-phosphate
  modified_base 6: mod_base = OTHER; note = 2'-fluoro modified abasic nucleotide
  modified_base 7: mod_base = OTHER; note = 2'-O-methyladenosine-3'-phosphate
  modified_base 8: mod_base = OTHER; note = 2'-O-methyluridine-3'-phosphate
  modified_base 9: mod_base = OTHER; note = 2'-O-methylcytidine-3'-phosphate
  modified_base 10: mod_base = OTHER; note = 2'-O-methylcytidine-3'-phosphate
  modified_base 11: mod_base = OTHER; note = 2'-O-methyladenosine-3'-phosphate
  modified_base 12: mod_base = OTHER; note = 2'-O-methyluridine-3'-phosphate
  modified_base 13: mod_base = OTHER; note = 2'-O-methylguanosine-3'-phosphate
  modified_base 14: mod_base = OTHER; note = 2'-fluoroguanosine-3'-phosphate
  modified_base 15: mod_base = OTHER; note = 2'-O-methyladenosine-3'-phosphate
  modified_base 16: mod_base = OTHER; note = 2'-fluorocytidine-3'-phosphate
  modified_base 17: mod_base = OTHER; note = 2'-O-methyluridine-3'-phosphate
  modified_base 18: mod_base = OTHER; note = 2'-O-methyluridine-3'-phosphate
  modified_base 19: mod_base = OTHER; note = 2'-O-methylguanosine-3'-phosphate
  modified_base 20: mod_base = OTHER; note = 2'-O-methyluridine-3'-phosphate
  modified_base 21: mod_base = OTHER; note = 2'-O-methyladenosine-3'-phosphorothioate
  modified_base 22: mod_base = OTHER; note = 2'-O-methylguanosine-3'-phosphorothioate
  modified_base 23: mod_base = OTHER; note = 2'-O-methyluridine-3'-phosphate
tacganatccatggacttgtagt

SEQ ID NO: 186585 - DNA, 23 bp, synthetic construct
  source 1..23: mol_type = other DNA
  modified_base 2: mod_base = OTHER; note = 2'-O-methylguanosine-3'-phosphate
  modified_base 3: mod_base = OTHER; note = 2'-O-methylguanosine-3'-phosphate
  modified_base 4: mod_base = OTHER; note = 2'-O-methyladenosine-3'-phosphate
  modified_base 13: mod_base = OTHER; note = 2'-O-methyladenosine-3'-phosphate
  modified_base 22: mod_base = OTHER; note = 2'-O-methyluridine-3'-phosphorothioate
  modified_base 23: mod_base = OTHER; note = 2'-O-methyladenosine-3'-phosphate
  misc_feature 1: note = DNA
  misc_feature 2..23: note = RNA
tggacgatatccatggacttgta

SEQ ID NO: 186586 - DNA, 23 bp, synthetic construct
  source 1..23: mol_type = other DNA
  modified_base 2: mod_base = OTHER; note = 2'-O-methylguanosine-3'-phosphate
  modified_base 3: mod_base = OTHER; note = 2'-O-methylguanosine-3'-phosphate
  modified_base 4: mod_base = OTHER; note = 2'-O-methyladenosine-3'-phosphate
  modified_base 5: mod_base = OTHER; note = 2'-O-methylcytidine-3'-phosphate
  modified_base 13: mod_base = OTHER; note = 2'-O-methyladenosine-3'-phosphate
  modified_base 22: mod_base = OTHER; note = 2'-O-methyluridine-3'-phosphorothioate
  modified_base 23: mod_base = OTHER; note = 2'-O-methyladenosine-3'-phosphate
  misc_feature 1: note = DNA
  misc_feature 2..23: note = RNA
tggacgatatccatggacttgta

SEQ ID NO: 186587 - DNA, 23 bp, synthetic construct
  source 1..23: mol_type = other DNA
  modified_base 3: mod_base = OTHER; note = 2'-O-methylguanosine-3'-phosphate
  modified_base 4: mod_base = OTHER; note = 2'-O-methyladenosine-3'-phosphate
  modified_base 5: mod_base = OTHER; note = 2'-O-methylcytidine-3'-phosphate
  modified_base 13: mod_base = OTHER; note = 2'-O-methyladenosine-3'-phosphate
  modified_base 22: mod_base = OTHER; note = 2'-O-methyluridine-3'-phosphorothioate
  modified_base 23: mod_base = OTHER; note = 2'-O-methyladenosine-3'-phosphate
  misc_feature 1: note = DNA
  misc_feature 2..23: note = RNA
tggacgatatccatggacttgta

SEQ ID NO: 186588 - DNA, 23 bp, synthetic construct
  source 1..23: mol_type = other DNA
  modified_base 13: mod_base = OTHER; note = 2'-O-methyladenosine-3'-phosphate
  modified_base 22: mod_base = OTHER; note = 2'-O-methyluridine-3'-phosphorothioate
  modified_base 23: mod_base = OTHER; note = 2'-O-methyladenosine-3'-phosphate
  misc_feature 1: note = DNA
  misc_feature 2..23: note = RNA
tggatgatatccatggacttgta

SEQ ID NO: 186589 - DNA, 23 bp, synthetic construct
  source 1..23: mol_type = other DNA
  modified_base 13: mod_base = OTHER; note = 2'-O-methyladenosine-3'-phosphate
  modified_base 22: mod_base = OTHER; note = 2'-O-methyluridine-3'-phosphorothioate
  modified_base 23: mod_base = OTHER; note = 2'-O-methyladenosine-3'-phosphate
  misc_feature 1: note = DNA
  misc_feature 2..23: note = RNA
tggacgatatccatggactcgta

SEQ ID NO: 186590 - DNA, 23 bp, synthetic construct
  source 1..23: mol_type = other DNA
  modified_base 1: mod_base = OTHER; note = 2'-deoxythymidine-3'-phosphorothioate
  modified_base 2: mod_base = OTHER; note = Guanosine-3'-phosphorothioate
  modified_base 13: mod_base = OTHER; note = 2'-O-methyladenosine-3'-phosphate
  modified_base 21: mod_base = OTHER; note = Guanosine-3'-phosphorothioate
  modified_base 22: mod_base = OTHER; note = 2'-O-methyluridine-3'-phosphorothioate
  modified_base 23: mod_base = OTHER; note = 2'-O-methyladenosine-3'-phosphate
  misc_feature 1: note = DNA
  misc_feature 2..23: note = RNA
tggacgatatccatggacttgta

SEQ ID NO: 186591 - RNA, 23 nt, synthetic construct
  source 1..23: mol_type = other RNA
  modified_base 1: mod_base = OTHER; note = 5'-vinyl-phosphonate 2'-O-methyluridine-3'-phosphate
  modified_base 13: mod_base = OTHER; note = 2'-O-methyladenosine-3'-phosphate
  modified_base 22: mod_base = OTHER; note = 2'-O-methyluridine-3'-phosphorothioate
  modified_base 23: mod_base = OTHER; note = 2'-O-methyladenosine-3'-phosphate
tggacgatatccatggacttgta

SEQ ID NO: 186592 - DNA, 23 bp, synthetic construct
  source 1..23: mol_type = other DNA
  modified_base 6: mod_base = OTHER; note = Guanosine-glycol nucleic acid (GNA)
  modified_base 13: mod_base = OTHER; note = 2'-O-methyladenosine-3'-phosphate
  modified_base 22: mod_base = OTHER; note = 2'-O-methyluridine-3'-phosphorothioate
  modified_base 23: mod_base = OTHER; note = 2'-O-methyladenosine-3'-phosphate
  misc_feature 1: note = DNA
  misc_feature 2..23: note = RNA
tggacgatatccatggacttgta

SEQ ID NO: 186593 - DNA, 23 bp, synthetic construct
  source 1..23: mol_type = other DNA
  modified_base 7: mod_base = OTHER; note = Adenosine-glycol nucleic acid (GNA)
  modified_base 13: mod_base = OTHER; note = 2'-O-methyladenosine-3'-phosphate
  modified_base 22: mod_base = OTHER; note = 2'-O-methyluridine-3'-phosphorothioate
  modified_base 23: mod_base = OTHER; note = 2'-O-methyladenosine-3'-phosphate
  misc_feature 1: note = DNA
  misc_feature 2..23: note = RNA
tggacgatatccatggacttgta

SEQ ID NO: 186594 - DNA, 23 bp, synthetic construct
  source 1..23: mol_type = other DNA
  modified_base 9: mod_base = OTHER; note = 2'-O-methoxyethyladenosine-3'-phosphate
  modified_base 10: mod_base = OTHER; note = 2'-O-methoxyethyl-5-methyluridine-3'-phosphate
  modified_base 13: mod_base = OTHER; note = 2'-O-methyladenosine-3'-phosphate
  modified_base 22: mod_base = OTHER; note = 2'-O-methyluridine-3'-phosphorothioate
  modified_base 23: mod_base = OTHER; note = 2'-O-methyladenosine-3'-phosphate
  misc_feature 1: note = DNA
  misc_feature 2..23: note = RNA
tggacgatatccatggacttgta

SEQ ID NO: 186595 - RNA, 23 nt, synthetic construct
  source 1..23: mol_type = other RNA
  modified_base 1: mod_base = OTHER; note = 5'-vinyl-phosphonate 2'-O-methyluridine-3'-phosphorothioate
  modified_base 2: mod_base = OTHER; note = Guanosine-3'-phosphorothioate
  modified_base 13: mod_base = OTHER; note = 2'-O-methyladenosine-3'-phosphate
  modified_base 21: mod_base = OTHER; note = Guanosine-3'-phosphorothioate
  modified_base 22: mod_base = OTHER; note = 2'-O-methyluridine-3'-phosphorothioate
  modified_base 23: mod_base = OTHER; note = 2'-O-methyladenosine-3'-phosphate
tggacgatatccatggacttgta

SEQ ID NO: 186596 - RNA, 23 nt, synthetic construct
  source 1..23: mol_type = other RNA
  modified_base 1: mod_base = OTHER; note = 5'-vinyl-phosphonate 2'-O-methyluridine-3'-phosphorothioate
  modified_base 2: mod_base = OTHER; note = Guanosine-3'-phosphorothioate
  modified_base 3: mod_base = OTHER; note = 2'-O-methylguanosine-3'-phosphate
  modified_base 4: mod_base = OTHER; note = 2'-O-methyladenosine-3'-phosphate
  modified_base 5: mod_base = OTHER; note = 2'-O-methylcytidine-3'-phosphate
  modified_base 7: mod_base = OTHER; note = 2'-O-methyladenosine-3'-phosphate
  modified_base 8: mod_base = OTHER; note = 2'-O-methyluridine-3'-phosphate
  modified_base 9: mod_base = OTHER; note = 2'-O-methyladenosine-3'-phosphate
  modified_base 10: mod_base = OTHER; note = 2'-O-methyluridine-3'-phosphate
  modified_base 11: mod_base = OTHER; note = 2'-O-methylcytidine-3'-phosphate
  modified_base 12: mod_base = OTHER; note = 2'-O-methylcytidine-3'-phosphate
  modified_base 13: mod_base = OTHER; note = 2'-O-methyladenosine-3'-phosphate
  modified_base 15: mod_base = OTHER; note = 2'-O-methylguanosine-3'-phosphate
  modified_base 17: mod_base = OTHER; note = 2'-O-methyladenosine-3'-phosphate
  modified_base 18: mod_base = OTHER; note = 2'-O-methylcytidine-3'-phosphate
  modified_base 19: mod_base = OTHER; note = 2'-O-methyluridine-3'-phosphate
  modified_base 20: mod_base = OTHER; note = 2'-O-methyluridine-3'-phosphate
  modified_base 21: mod_base = OTHER; note = 2'-O-methylguanosine-3'-phosphorothioate
  modified_base 22: mod_base = OTHER; note = 2'-O-methyluridine-3'-phosphorothioate
  modified_base 23: mod_base = OTHER; note = 2'-O-methyladenosine-3'-phosphate
tggacgatatccatggacttgta

SEQ ID NO: 186597 - DNA, 23 bp, synthetic construct
  source 1..23: mol_type = other DNA
  modified_base 1: mod_base = OTHER; note = 5'-vinyl-phosphonate 2'-O-methyluridine-3'-phosphorothioate
  modified_base 2: mod_base = OTHER; note = 2'-deoxyguanosine-3'-phosphorothioate
  modified_base 3: mod_base = OTHER; note = 2'-O-methylguanosine-3'-phosphate
  modified_base 4: mod_base = OTHER; note = 2'-O-methyladenosine-3'-phosphate
  modified_base 5: mod_base = OTHER; note = 2'-O-methylcytidine-3'-phosphate
  modified_base 7: mod_base = OTHER; note = 2'-O-methyladenosine-3'-phosphate
  modified_base 8: mod_base = OTHER; note = 2'-O-methyluridine-3'-phosphate
  modified_base 9: mod_base = OTHER; note = 2'-O-methyladenosine-3'-phosphate
  modified_base 10: mod_base = OTHER; note = 2'-O-methyluridine-3'-phosphate
  modified_base 11: mod_base = OTHER; note = 2'-O-methylcytidine-3'-phosphate
  modified_base 12: mod_base = OTHER; note = 2'-O-methylcytidine-3'-phosphate
  modified_base 13: mod_base = OTHER; note = 2'-O-methyladenosine-3'-phosphate
  modified_base 15: mod_base = OTHER; note = 2'-O-methylguanosine-3'-phosphate
  modified_base 17: mod_base = OTHER; note = 2'-O-methyladenosine-3'-phosphate
  modified_base 18: mod_base = OTHER; note = 2'-O-methylcytidine-3'-phosphate
  modified_base 19: mod_base = OTHER; note = 2'-O-methyluridine-3'-phosphate
  modified_base 20: mod_base = OTHER; note = 2'-O-methyluridine-3'-phosphate
  modified_base 21: mod_base = OTHER; note = 2'-O-methylguanosine-3'-phosphorothioate
  modified_base 22: mod_base = OTHER; note = 2'-O-methyluridine-3'-phosphorothioate
  modified_base 23: mod_base = OTHER; note = 2'-O-methyladenosine-3'-phosphate
  misc_feature 1: note = RNA
  misc_feature 2: note = DNA
  misc_feature 3..5: note = RNA
  misc_feature 6: note = DNA
  misc_feature 7..13: note = RNA
  misc_feature 14: note = DNA
  misc_feature 15: note = RNA
  misc_feature 16: note = DNA
  misc_feature 17..23: note = RNA
tggacgatatccatggacttgta

SEQ ID NO: 186598 - DNA, 23 bp, synthetic construct
  source 1..23: mol_type = other DNA
  modified_base 1: mod_base = OTHER; note = 5'-vinyl-phosphonate 2'-O-methyluridine-3'-phosphorothioate
  modified_base 2: mod_base = OTHER; note = 2'-deoxyguanosine-3'-phosphorothioate
  modified_base 3: mod_base = OTHER; note = 2'-O-methylguanosine-3'-phosphate
  modified_base 4: mod_base = OTHER; note = 2'-O-methyladenosine-3'-phosphate
  modified_base 5: mod_base = OTHER; note = 2'-O-methylcytidine-3'-phosphate
  modified_base 7: mod_base = OTHER; note = Adenosine-glycol nucleic acid (GNA)
  modified_base 8: mod_base = OTHER; note = 2'-O-methyluridine-3'-phosphate
  modified_base 9: mod_base = OTHER; note = 2'-O-methyladenosine-3'-phosphate
  modified_base 10: mod_base = OTHER; note = 2'-O-methyluridine-3'-phosphate
  modified_base 11: mod_base = OTHER; note = 2'-O-methylcytidine-3'-phosphate
  modified_base 12: mod_base = OTHER; note = 2'-O-methylcytidine-3'-phosphate
  modified_base 13: mod_base = OTHER; note = 2'-O-methyladenosine-3'-phosphate
  modified_base 15: mod_base = OTHER; note = 2'-O-methylguanosine-3'-phosphate
  modified_base 17: mod_base = OTHER; note = 2'-O-methyladenosine-3'-phosphate
  modified_base 18: mod_base = OTHER; note = 2'-O-methylcytidine-3'-phosphate
  modified_base 19: mod_base = OTHER; note = 2'-O-methyluridine-3'-phosphate
  modified_base 20: mod_base = OTHER; note = 2'-O-methyluridine-3'-phosphate
  modified_base 21: mod_base = OTHER; note = 2'-O-methylguanosine-3'-phosphorothioate
  modified_base 22: mod_base = OTHER; note = 2'-O-methyluridine-3'-phosphorothioate
  modified_base 23: mod_base = OTHER; note = 2'-O-methyladenosine-3'-phosphate
  misc_feature 1: note = RNA
  misc_feature 2: note = DNA
  misc_feature 3..5: note = RNA
  misc_feature 6: note = DNA
  misc_feature 7..13: note = RNA
  misc_feature 14: note = DNA
  misc_feature 15: note = RNA
  misc_feature 16: note = DNA
  misc_feature 17..23: note = RNA
tggacgatatccatggacttgta

SEQ ID NO: 186599 - RNA, 23 nt, synthetic construct
  source 1..23: mol_type = other RNA
  modified_base 1: mod_base = OTHER; note = 5'-vinyl-phosphonate 2'-O-methyluridine-3'-phosphate
  modified_base 2: mod_base = OTHER; note = 2'-O-methylguanosine-3'-phosphate
  modified_base 13: mod_base = OTHER; note = 2'-O-methyladenosine-3'-phosphate
  modified_base 22: mod_base = OTHER; note = 2'-O-methyluridine-3'-phosphorothioate
  modified_base 23: mod_base = OTHER; note = 2'-O-methyladenosine-3'-phosphate
tggacgatatccatggacttgta

SEQ ID NO: 186600 - RNA, 23 nt, synthetic construct
  source 1..23: mol_type = other RNA
  modified_base 1: mod_base = OTHER; note = 5'-vinyl-phosphonate 2'-O-methyluridine-3'-phosphate
  modified_base 7: mod_base = OTHER; note = Adenosine-glycol nucleic acid (GNA)
  modified_base 13: mod_base = OTHER; note = 2'-O-methyladenosine-3'-phosphate
  modified_base 22: mod_base = OTHER; note = 2'-O-methyluridine-3'-phosphorothioate
  modified_base 23: mod_base = OTHER; note = 2'-O-methyladenosine-3'-phosphate
tggacgatatccatggacttgta

SEQ ID NO: 186601 - RNA, 23 nt, synthetic construct
  source 1..23: mol_type = other RNA
  modified_base 1: mod_base = OTHER; note = 5'-vinyl-phosphonate 2'-O-methyluridine-3'-phosphate
  modified_base 3: mod_base = OTHER; note = 2'-O-methylguanosine-3'-phosphate
  modified_base 4: mod_base = OTHER; note = 2'-O-methyladenosine-3'-phosphate
  modified_base 5: mod_base = OTHER; note = 2'-O-methylcytidine-3'-phosphate
  modified_base 7: mod_base = OTHER; note = Adenosine-glycol nucleic acid (GNA)
  modified_base 13: mod_base = OTHER; note = 2'-O-methyladenosine-3'-phosphate
  modified_base 22: mod_base = OTHER; note = 2'-O-methyluridine-3'-phosphorothioate
  modified_base 23: mod_base = OTHER; note = 2'-O-methyladenosine-3'-phosphate
tggacgatatccatggacttgta

SEQ ID NO: 186602 - RNA, 23 nt, synthetic construct
  source 1..23: mol_type = other RNA
  modified_base 1: mod_base = OTHER; note = 5'-vinyl-phosphonate 2'-O-methyluridine-3'-phosphate
  modified_base 3: mod_base = OTHER; note = 2'-O-methylguanosine-3'-phosphate
  modified_base 4: mod_base = OTHER; note = 2'-O-methyladenosine-3'-phosphate
  modified_base 5: mod_base = OTHER; note = 2'-O-methylcytidine-3'-phosphate
  modified_base 7: mod_base = OTHER; note = Adenosine-glycol nucleic acid (GNA)
  modified_base 9: mod_base = OTHER; note = 2'-O-methoxyethyladenosine-3'-phosphate
  modified_base 10: mod_base = OTHER; note = 2'-O-methoxyethyl-5-methyluridine-3'-phosphate
  modified_base 13: mod_base = OTHER; note = 2'-O-methyladenosine-3'-phosphate
  modified_base 22: mod_base = OTHER; note = 2'-O-methyluridine-3'-phosphorothioate
  modified_base 23: mod_base = OTHER; note = 2'-O-methyladenosine-3'-phosphate
tggacgatatccatggacttgta

SEQ ID NO: 186603 - RNA, 23 nt, synthetic construct
  source 1..23: mol_type = other RNA
  modified_base 1: mod_base = OTHER; note = 5'-vinyl-phosphonate 2'-O-methyluridine-3'-phosphorothioate
  modified_base 2: mod_base = OTHER; note = 2'-fluoroadenosine-3'-phosphorothioate
  modified_base 3: mod_base = OTHER; note = 2'-O-methylcytidine-3'-phosphate
  modified_base 4: mod_base = OTHER; note = 2'-O-methylcytidine-3'-phosphate
  modified_base 5: mod_base = OTHER; note = 2'-O-methylguanosine-3'-phosphate
  modified_base 6: mod_base = OTHER; note = 2'-fluoroguanosine-3'-phosphate
  modified_base 7: mod_base = OTHER; note = 2'-O-methyladenosine-3'-phosphate
  modified_base 8: mod_base = OTHER; note = 2'-O-methyladenosine-3'-phosphate
  modified_base 9: mod_base = OTHER; note = 2'-O-methyluridine-3'-phosphate
  modified_base 10: mod_base = OTHER; note = 2'-O-methyluridine-3'-phosphate
  modified_base 11: mod_base = OTHER; note = 2'-O-methyluridine-3'-phosphate
  modified_base 12: mod_base = OTHER; note = 2'-O-methylguanosine-3'-phosphate
  modified_base 13: mod_base = OTHER; note = 2'-O-methylguanosine-3'-phosphate
  modified_base 14: mod_base = OTHER; note = 2'-fluorouridine-3'-phosphate
  modified_base 15: mod_base = OTHER; note = 2'-O-methylcytidine-3'-phosphate
  modified_base 16: mod_base = OTHER; note = 2'-fluoroadenosine-3'-phosphate
  modified_base 17: mod_base = OTHER; note = 2'-O-methyladenosine-3'-phosphate
  modified_base 18: mod_base = OTHER; note = 2'-O-methyladenosine-3'-phosphate
  modified_base 19: mod_base = OTHER; note = 2'-O-methylcytidine-3'-phosphate
  modified_base 20: mod_base = OTHER; note = 2'-O-methyladenosine-3'-phosphate
  modified_base 21: mod_base = OTHER; note = 2'-O-methylguanosine-3'-phosphorothioate
  modified_base 22: mod_base = OTHER; note = 2'-O-methylguanosine-3'-phosphorothioate
  modified_base 23: mod_base = OTHER; note = 2'-O-methyladenosine-3'-phosphate
taccggaatttggtcaaacagga

SEQ ID NO: 186604 - RNA, 23 nt, synthetic construct
  source 1..23: mol_type = other RNA
  modified_base 1: mod_base = OTHER; note = 2'-O-methyluridine-3'-phosphorothioate
  modified_base 2: mod_base = OTHER; note = 2'-fluoroadenosine-3'-phosphorothioate
  modified_base 3: mod_base = OTHER; note = 2'-O-methylcytidine-3'-phosphate
  modified_base 4: mod_base = OTHER; note = 2'-O-methylcytidine-3'-phosphate
  modified_base 5: mod_base = OTHER; note = 2'-O-methylguanosine-3'-phosphate
  modified_base 6: mod_base = OTHER; note = Guanosine-glycol nucleic acid (GNA)
  modified_base 7: mod_base = OTHER; note = 2'-O-methyladenosine-3'-phosphate
  modified_base 8: mod_base = OTHER; note = 2'-O-methyladenosine-3'-phosphate
  modified_base 9: mod_base = OTHER; note = 2'-O-methyluridine-3'-phosphate
  modified_base 10: mod_base = OTHER; note = 2'-O-methyluridine-3'-phosphate
  modified_base 11: mod_base = OTHER; note = 2'-O-methyluridine-3'-phosphate
  modified_base 12: mod_base = OTHER; note = 2'-O-methylguanosine-3'-phosphate
  modified_base 13: mod_base = OTHER; note = 2'-O-methylguanosine-3'-phosphate
  modified_base 14: mod_base = OTHER; note = 2'-fluorouridine-3'-phosphate
  modified_base 15: mod_base = OTHER; note = 2'-O-methylcytidine-3'-phosphate
  modified_base 16: mod_base = OTHER; note = 2'-fluoroadenosine-3'-phosphate
  modified_base 17: mod_base = OTHER; note = 2'-O-methyladenosine-3'-phosphate
  modified_base 18: mod_base = OTHER; note = 2'-O-methyladenosine-3'-phosphate
  modified_base 19: mod_base = OTHER; note = 2'-O-methylcytidine-3'-phosphate
  modified_base 20: mod_base = OTHER; note = 2'-O-methyladenosine-3'-phosphate
  modified_base 21: mod_base = OTHER; note = 2'-O-methylguanosine-3'-phosphorothioate
  modified_base 22: mod_base = OTHER; note = 2'-O-methylguanosine-3'-phosphorothioate
  modified_base 23: mod_base = OTHER; note = 2'-O-methyladenosine-3'-phosphate
taccggaatttggtcaaacagga

SEQ ID NO: 186605 - RNA, 23 nt, synthetic construct
  source 1..23: mol_type = other RNA
  modified_base 1: mod_base = OTHER; note = 2'-O-methyluridine-3'-phosphorothioate
  modified_base 2: mod_base = OTHER; note = 2'-fluoroadenosine-3'-phosphorothioate
  modified_base 3: mod_base = OTHER; note = 2'-O-methylcytidine-3'-phosphate
  modified_base 4: mod_base = OTHER; note = 2'-O-methylcytidine-3'-phosphate
  modified_base 5: mod_base = OTHER; note = 2'-O-methylguanosine-3'-phosphate
  modified_base 6: mod_base = OTHER; note = 2'-fluoroguanosine-3'-phosphate
  modified_base 7: mod_base = OTHER; note = Adenosine-glycol nucleic acid (GNA)
  modified_base 8: mod_base = OTHER; note = 2'-O-methyladenosine-3'-phosphate
  modified_base 9: mod_base = OTHER; note = 2'-O-methyluridine-3'-phosphate
  modified_base 10: mod_base = OTHER; note = 2'-O-methyluridine-3'-phosphate
  modified_base 11: mod_base = OTHER; note = 2'-O-methyluridine-3'-phosphate
  modified_base 12: mod_base = OTHER; note = 2'-O-methylguanosine-3'-phosphate
  modified_base 13: mod_base = OTHER; note = 2'-O-methylguanosine-3'-phosphate
  modified_base 14: mod_base = OTHER; note = 2'-fluorouridine-3'-phosphate
  modified_base 15: mod_base = OTHER; note = 2'-O-methylcytidine-3'-phosphate
  modified_base 16: mod_base = OTHER; note = 2'-fluoroadenosine-3'-phosphate
  modified_base 17: mod_base = OTHER; note = 2'-O-methyladenosine-3'-phosphate
  modified_base 18: mod_base = OTHER; note = 2'-O-methyladenosine-3'-phosphate
  modified_base 19: mod_base = OTHER; note = 2'-O-methylcytidine-3'-phosphate
  modified_base 20: mod_base = OTHER; note = 2'-O-methyladenosine-3'-phosphate
  modified_base 21: mod_base = OTHER; note = 2'-O-methylguanosine-3'-phosphorothioate
  modified_base 22: mod_base = OTHER; note = 2'-O-methylguanosine-3'-phosphorothioate
  modified_base 23: mod_base = OTHER; note = 2'-O-methyladenosine-3'-phosphate
taccggaatttggtcaaacagga

SEQ ID NO: 186606 - RNA, 23 nt, synthetic construct
  source 1..23: mol_type = other RNA
  modified_base 1: mod_base = OTHER; note = 2'-O-methyluridine-3'-phosphorothioate
  modified_base 2: mod_base = OTHER; note = 2'-fluoroadenosine-3'-phosphorothioate
  modified_base 3: mod_base = OTHER; note = 2'-O-methyluridine-3'-phosphate
  modified_base 4: mod_base = OTHER; note = 2'-O-methylcytidine-3'-phosphate
  modified_base 5: mod_base = OTHER; note = 2'-O-methylguanosine-3'-phosphate
  modified_base 6: mod_base = OTHER; note = 2'-fluoroguanosine-3'-phosphate
  modified_base 7: mod_base = OTHER; note = 2'-O-methyladenosine-3'-phosphate
  modified_base 8: mod_base = OTHER; note = 2'-O-methyladenosine-3'-phosphate
  modified_base 9: mod_base = OTHER; note = 2'-O-methyluridine-3'-phosphate
  modified_base 10: mod_base = OTHER; note = 2'-O-methyluridine-3'-phosphate
  modified_base 11: mod_base = OTHER; note = 2'-O-methyluridine-3'-phosphate
  modified_base 12: mod_base = OTHER; note = 2'-O-methylguanosine-3'-phosphate
  modified_base 13: mod_base = OTHER; note = 2'-O-methylguanosine-3'-phosphate
  modified_base 14: mod_base = OTHER; note = 2'-fluorouridine-3'-phosphate
  modified_base 15: mod_base = OTHER; note = 2'-O-methylcytidine-3'-phosphate
  modified_base 16: mod_base = OTHER; note = 2'-fluoroadenosine-3'-phosphate
  modified_base 17: mod_base = OTHER; note = 2'-O-methyladenosine-3'-phosphate
  modified_base 18: mod_base = OTHER; note = 2'-O-methyladenosine-3'-phosphate
  modified_base 19: mod_base = OTHER; note = 2'-O-methylcytidine-3'-phosphate
  modified_base 20: mod_base = OTHER; note = 2'-O-methyladenosine-3'-phosphate
  modified_base 21: mod_base = OTHER; note = 2'-O-methylguanosine-3'-phosphorothioate
  modified_base 22: mod_base = OTHER; note = 2'-O-methylguanosine-3'-phosphorothioate
  modified_base 23: mod_base = OTHER; note = 2'-O-methyladenosine-3'-phosphate
tatcggaatttggtcaaacagga

SEQ ID NO: 186607 - RNA, 23 nt, synthetic construct
  source 1..23: mol_type = other RNA
  modified_base 1: mod_base = OTHER; note = 2'-O-methyluridine-3'-phosphorothioate
  modified_base 2: mod_base = OTHER; note = 2'-fluoroadenosine-3'-phosphorothioate
  modified_base 3: mod_base = OTHER; note = 2'-O-methylcytidine-3'-phosphate
  modified_base 4: mod_base = OTHER; note = 2'-O-methylcytidine-3'-phosphate
  modified_base 5: mod_base = OTHER; note = 2'-O-methylguanosine-3'-phosphate
  modified_base 6: mod_base = OTHER; note = 2'-fluoroguanosine-3'-phosphate
  modified_base 7: mod_base = OTHER; note = 2'-O-methyladenosine-3'-phosphate
  modified_base 8: mod_base = OTHER; note = 2'-O-methyladenosine-3'-phosphate
  modified_base 9: mod_base = OTHER; note = 2'-O-methyluridine-3'-phosphate
  modified_base 10: mod_base = OTHER; note = 2'-O-methyluridine-3'-phosphate
  modified_base 11: mod_base = OTHER; note = 2'-O-methyluridine-3'-phosphate
  modified_base 12: mod_base = OTHER; note = 2'-O-methylguanosine-3'-phosphate
  modified_base 13: mod_base = OTHER; note = 2'-O-methylguanosine-3'-phosphate
  modified_base 14: mod_base = OTHER; note = 2'-fluorouridine-3'-phosphate
  modified_base 15: mod_base = OTHER; note = 2'-O-methylcytidine-3'-phosphate
  modified_base 16: mod_base = OTHER; note = 2'-fluoroadenosine-3'-phosphate
  modified_base 17: mod_base = OTHER; note = 2'-O-methyladenosine-3'-phosphate
  modified_base 18: mod_base = OTHER; note = 2'-O-methyladenosine-3'-phosphate
  modified_base 19: mod_base = OTHER; note = 2'-O-methylcytidine-3'-phosphate
  modified_base 20: mod_base = OTHER; note = 2'-O-methyladenosine-3'-phosphate
  modified_base 21: mod_base = OTHER; note = 2'-O-methylguanosine-3'-phosphorothioate
  modified_base 22: mod_base = OTHER; note = 2'-O-methoxyethylguanosine-3'-phosphorothioate
  modified_base 23: mod_base = OTHER; note = 2'-O-methoxyethyladenosine-3'-phosphate
taccggaatttggtcaaacagga

SEQ ID NO: 186608 - RNA, 23 nt, synthetic construct
  source 1..23: mol_type = other RNA
  modified_base 1: mod_base = OTHER; note = 5'-vinyl-phosphonate 2'-O-methyluridine-3'-phosphorothioate
  modified_base 2: mod_base = OTHER; note = 2'-O-methyladenosine-3'-phosphorothioate
  modified_base 3: mod_base = OTHER; note = 2'-O-methylcytidine-3'-phosphate
  modified_base 4: mod_base = OTHER; note = 2'-O-methylcytidine-3'-phosphate
  modified_base 5: mod_base = OTHER; note = 2'-O-methylguanosine-3'-phosphate
  modified_base 6: mod_base = OTHER; note = 2'-fluoroguanosine-3'-phosphate
  modified_base 7: mod_base = OTHER; note = 2'-O-methyladenosine-3'-phosphate
  modified_base 8: mod_base = OTHER; note = 2'-O-methyladenosine-3'-phosphate
  modified_base 9: mod_base = OTHER; note = 2'-O-methyluridine-3'-phosphate
  modified_base 10: mod_base = OTHER; note = 2'-O-methyluridine-3'-phosphate
  modified_base 11: mod_base = OTHER; note = 2'-O-methyluridine-3'-phosphate
  modified_base 12: mod_base = OTHER; note = 2'-O-methylguanosine-3'-phosphate
  modified_base 13: mod_base = OTHER; note = 2'-O-methylguanosine-3'-phosphate
  modified_base 14: mod_base = OTHER; note = 2'-fluorouridine-3'-phosphate
  modified_base 15: mod_base = OTHER; note = 2'-O-methylcytidine-3'-phosphate
  modified_base 16: mod_base = OTHER; note = 2'-fluoroadenosine-3'-phosphate
  modified_base 17: mod_base = OTHER; note = 2'-O-methyladenosine-3'-phosphate
  modified_base 18: mod_base = OTHER; note = 2'-O-methyladenosine-3'-phosphate
  modified_base 19: mod_base = OTHER; note = 2'-O-methylcytidine-3'-phosphate
  modified_base 20: mod_base = OTHER; note = 2'-O-methyladenosine-3'-phosphate
  modified_base 21: mod_base = OTHER; note = 2'-O-methylguanosine-3'-phosphorothioate
  modified_base 22: mod_base = OTHER; note = 2'-O-methylguanosine-3'-phosphorothioate
  modified_base 23: mod_base = OTHER; note = 2'-O-methyladenosine-3'-phosphate
taccggaatttggtcaaacagga

SEQ ID NO: 186609 - RNA, 23 nt, synthetic construct
  source 1..23: mol_type = other RNA
  modified_base 1: mod_base = OTHER; note = 2'-O-methyluridine-3'-phosphorothioate
  modified_base 2: mod_base = OTHER; note = 2'-fluoroadenosine-3'-phosphorothioate
  modified_base 3: mod_base = OTHER; note = 2'-O-methylcytidine-3'-phosphate
  modified_base 4: mod_base = OTHER; note = 2'-O-methylcytidine-3'-phosphate
  modified_base 5: mod_base = OTHER; note = 2'-O-methylguanosine-3'-phosphate
  modified_base 6: mod_base = OTHER; note = Abasic nucleotide
  modified_base 7: mod_base = OTHER; note = 2'-O-methyladenosine-3'-phosphate
  modified_base 8: mod_base = OTHER; note = 2'-O-methyladenosine-3'-phosphate
  modified_base 9: mod_base = OTHER; note = 2'-O-methyluridine-3'-phosphate
  modified_base 10: mod_base = OTHER; note = 2'-O-methyluridine-3'-phosphate
  modified_base 11: mod_base = OTHER; note = 2'-O-methyluridine-3'-phosphate
  modified_base 12: mod_base = OTHER; note = 2'-O-methylguanosine-3'-phosphate
  modified_base 13: mod_base = OTHER; note = 2'-O-methylguanosine-3'-phosphate
  modified_base 14: mod_base = OTHER; note = 2'-fluorouridine-3'-phosphate
  modified_base 15: mod_base = OTHER; note = 2'-O-methylcytidine-3'-phosphate
  modified_base 16: mod_base = OTHER; note = 2'-fluoroadenosine-3'-phosphate
  modified_base 17: mod_base = OTHER; note = 2'-O-methyladenosine-3'-phosphate
  modified_base 18: mod_base = OTHER; note = 2'-O-methyladenosine-3'-phosphate
  modified_base 19: mod_base = OTHER; note = 2'-O-methylcytidine-3'-phosphate
  modified_base 20: mod_base = OTHER; note = 2'-O-methyladenosine-3'-phosphate
  modified_base 21: mod_base = OTHER; note = 2'-O-methylguanosine-3'-phosphorothioate
  modified_base 22: mod_base = OTHER; note = 2'-O-methylguanosine-3'-phosphorothioate
  modified_base 23: mod_base = OTHER; note = 2'-O-methyladenosine-3'-phosphate
taccgnaatttggtcaaacagga

SEQ ID NO: 186610 - RNA, 23 nt, synthetic construct
  source 1..23: mol_type = other RNA
  modified_base 1: mod_base = OTHER; note = 2'-O-methyluridine-3'-phosphorothioate
  modified_base 2: mod_base = OTHER; note = 2'-fluoroadenosine-3'-phosphorothioate
  modified_base 3: mod_base = OTHER; note = 2'-O-methylcytidine-3'-phosphate
  modified_base 4: mod_base = OTHER; note = 2'-O-methylcytidine-3'-phosphate
  modified_base 5: mod_base = OTHER; note = 2'-O-methylguanosine-3'-phosphate
  modified_base 6: mod_base = OTHER; note = Abasic nucleotide
  modified_base 7: mod_base = OTHER; note = 2'-O-methyladenosine-3'-phosphate
  modified_base 8: mod_base = OTHER; note = 2'-O-methyladenosine-3'-phosphate
  modified_base 9: mod_base = OTHER; note = 2'-O-methyluridine-3'-phosphate
  modified_base 10: mod_base = OTHER; note = 2'-O-methyluridine-3'-phosphate
  modified_base 11: mod_base = OTHER; note = 2'-O-methyluridine-3'-phosphate
  modified_base 12: mod_base = OTHER; note = 2'-O-methylguanosine-3'-phosphate
  modified_base 13: mod_base = OTHER; note = 2'-O-methylguanosine-3'-phosphate
  modified_base 14: mod_base = OTHER; note = 2'-fluorouridine-3'-phosphate
  modified_base 15: mod_base = OTHER; note = 2'-O-methylcytidine-3'-phosphate
  modified_base 16: mod_base = OTHER; note = 2'-fluoroadenosine-3'-phosphate
  modified_base 17: mod_base = OTHER; note = 2'-O-methyladenosine-3'-phosphate
  modified_base 18: mod_base = OTHER; note = 2'-O-methyladenosine-3'-phosphate
  modified_base 19: mod_base = OTHER; note = 2'-O-methylcytidine-3'-phosphate
  modified_base 20: mod_base = OTHER; note = 2'-O-methyladenosine-3'-phosphate
  modified_base 21: mod_base = OTHER; note = 2'-O-methylguanosine-3'-phosphorothioate
  modified_base 22: mod_base = OTHER; note = 2'-O-methylguanosine-3'-phosphorothioate
  modified_base 23: mod_base = OTHER; note = 2'-O-methyladenosine-3'-phosphate
taccgnaatttggtcaaacagga

SEQ ID NO: 186611 - RNA, 17 nt, synthetic construct
  source 1..17: mol_type = other RNA
  modified_base 1: mod_base = OTHER; note = 2'-O-methyladenosine-3'-phosphate
  modified_base 2: mod_base = OTHER; note = 2'-O-methyladenosine-3'-phosphate
  modified_base 3: mod_base = OTHER; note = 2'-O-methyluridine-3'-phosphate
  modified_base 4: mod_base = OTHER; note = 2'-O-methyluridine-3'-phosphate
  modified_base 5: mod_base = OTHER; note = 2'-O-methyluridine-3'-phosphate
  modified_base 6: mod_base = OTHER; note = 2'-O-methylguanosine-3'-phosphate
  modified_base 7: mod_base = OTHER; note = 2'-O-methylguanosine-3'-phosphate
  modified_base 8: mod_base = OTHER; note = 2'-fluorouridine-3'-phosphate
  modified_base 9: mod_base = OTHER; note = 2'-O-methylcytidine-3'-phosphate
  modified_base 10: mod_base = OTHER; note = 2'-fluoroadenosine-3'-phosphate
  modified_base 11: mod_base = OTHER; note = 2'-O-methyladenosine-3'-phosphate
  modified_base 12: mod_base = OTHER; note = 2'-O-methyladenosine-3'-phosphate
  modified_base 13: mod_base = OTHER; note = 2'-O-methylcytidine-3'-phosphate
  modified_base 14: mod_base = OTHER; note = 2'-O-methyladenosine-3'-phosphate
  modified_base 15: mod_base = OTHER; note = 2'-O-methylguanosine-3'-phosphorothioate
  modified_base 16: mod_base = OTHER; note = 2'-O-methylguanosine-3'-phosphorothioate
  modified_base 17: mod_base = OTHER; note = 2'-O-methyladenosine-3'-phosphate
aatttggtcaaacagga

SEQ ID NO: 186612 - RNA, 23 nt, synthetic construct
  source 1..23: mol_type = other RNA
  modified_base 1: mod_base = OTHER; note = 2'-O-methyluridine-3'-phosphorothioate
  modified_base 2: mod_base = OTHER; note = 2'-fluoroadenosine-3'-phosphorothioate
  modified_base 3: mod_base = OTHER; note = 2'-O-methylcytidine-3'-phosphate
  modified_base 4: mod_base = OTHER; note = 2'-O-methylcytidine-3'-phosphate
  modified_base 5: mod_base = OTHER; note = 2'-O-methylguanosine-3'-phosphate
  modified_base 6: mod_base = OTHER; note = 2'-O-methyl modified abasic nucleotide
  modified_base 7: mod_base = OTHER; note = 2'-O-methyladenosine-3'-phosphate
  modified_base 8: mod_base = OTHER; note = 2'-O-methyladenosine-3'-phosphate
  modified_base 9: mod_base = OTHER; note = 2'-O-methyluridine-3'-phosphate
  modified_base 10: mod_base = OTHER; note = 2'-O-methyluridine-3'-phosphate
  modified_base 11: mod_base = OTHER; note = 2'-O-methyluridine-3'-phosphate
  modified_base 12: mod_base = OTHER; note = 2'-O-methylguanosine-3'-phosphate
  modified_base 13: mod_base = OTHER; note = 2'-O-methylguanosine-3'-phosphate
  modified_base 14: mod_base = OTHER; note = 2'-fluorouridine-3'-phosphate
  modified_base 15: mod_base = OTHER; note = 2'-O-methylcytidine-3'-phosphate
  modified_base 16: mod_base = OTHER; note = 2'-fluoroadenosine-3'-phosphate
  modified_base 17: mod_base = OTHER; note = 2'-O-methyladenosine-3'-phosphate
  modified_base 18: mod_base = OTHER; note = 2'-O-methyladenosine-3'-phosphate
  modified_base 19: mod_base = OTHER; note = 2'-O-methylcytidine-3'-phosphate
  modified_base 20: mod_base = OTHER; note = 2'-O-methyladenosine-3'-phosphate
  modified_base 21: mod_base = OTHER; note = 2'-O-methylguanosine-3'-phosphorothioate
  modified_base 22: mod_base = OTHER; note = 2'-O-methylguanosine-3'-phosphorothioate
  modified_base 23: mod_base = OTHER; note = 2'-O-methyladenosine-3'-phosphate
taccgnaatttggtcaaacagga

SEQ ID NO: 186613 - RNA, 23 nt, synthetic construct
  source 1..23: mol_type = other RNA
  modified_base 1: mod_base = OTHER; note = 2'-O-methyluridine-3'-phosphorothioate
  modified_base 2: mod_base = OTHER; note = 2'-fluoroadenosine-3'-phosphorothioate
  modified_base 3: mod_base = OTHER; note = 2'-O-methylcytidine-3'-phosphate
  modified_base 4: mod_base = OTHER; note = 2'-O-methylcytidine-3'-phosphate
  modified_base 5: mod_base = OTHER; note = 2'-O-methylguanosine-3'-phosphate
  modified_base 6: mod_base = OTHER; note = 2'-fluoro modified abasic nucleotide
  modified_base 7: mod_base = OTHER; note = 2'-O-methyladenosine-3'-phosphate
  modified_base 8: mod_base = OTHER; note = 2'-O-methyladenosine-3'-phosphate
  modified_base 9: mod_base = OTHER; note = 2'-O-methyluridine-3'-phosphate
  modified_base 10: mod_base = OTHER; note = 2'-O-methyluridine-3'-phosphate
  modified_base 11: mod_base = OTHER; note = 2'-O-methyluridine-3'-phosphate
  modified_base 12: mod_base = OTHER; note = 2'-O-methylguanosine-3'-phosphate
  modified_base 13: mod_base = OTHER; note = 2'-O-methylguanosine-3'-phosphate
  modified_base 14: mod_base = OTHER; note = 2'-fluorouridine-3'-phosphate
  modified_base 15: mod_base = OTHER; note = 2'-O-methylcytidine-3'-phosphate
  modified_base 16: mod_base = OTHER; note = 2'-fluoroadenosine-3'-phosphate
  modified_base 17: mod_base = OTHER; note = 2'-O-methyladenosine-3'-phosphate
  modified_base 18: mod_base = OTHER; note = 2'-O-methyladenosine-3'-phosphate
  modified_base 19: mod_base = OTHER; note = 2'-O-methylcytidine-3'-phosphate
  modified_base 20: mod_base = OTHER; note = 2'-O-methyladenosine-3'-phosphate
  modified_base 21: mod_base = OTHER; note = 2'-O-methylguanosine-3'-phosphorothioate
  modified_base 22: mod_base = OTHER; note = 2'-O-methylguanosine-3'-phosphorothioate
  modified_base 23: mod_base = OTHER; note = 2'-O-methyladenosine-3'-phosphate
taccgnaatttggtcaaacagga

SEQ ID NO: 186614 - RNA, 23 nt, synthetic construct
  source 1..23: mol_type = other RNA
  modified_base 1: mod_base = OTHER; note = 5'-vinyl-phosphonate 2'-O-methyluridine-3'-phosphorothioate
  modified_base 2: mod_base = OTHER; note = 2'-fluoroadenosine-3'-phosphorothioate
  modified_base 3: mod_base = OTHER; note = 2'-O-methylguanosine-3'-phosphate
  modified_base 4: mod_base = OTHER; note = 2'-O-methyluridine-3'-phosphate
  modified_base 5: mod_base = OTHER; note = 2'-O-methylguanosine-3'-phosphate
  modified_base 6: mod_base = OTHER; note = 2'-fluoroadenosine-3'-phosphate
  modified_base 7: mod_base = OTHER; note = 2'-O-methylcytidine-3'-phosphate
  modified_base 8: mod_base = OTHER; note = 2'-O-methylguanosine-3'-phosphate
  modified_base 9: mod_base = OTHER; note = 2'-O-methylguanosine-3'-phosphate
  modified_base 10: mod_base = OTHER; note = 2'-O-methylguanosine-3'-phosphate
  modified_base 11: mod_base = OTHER; note = 2'-O-methyluridine-3'-phosphate
  modified_base 12: mod_base = OTHER; note = 2'-O-methylguanosine-3'-phosphate
  modified_base 13: mod_base = OTHER; note = 2'-O-methylguanosine-3'-phosphate
  modified_base 14: mod_base = OTHER; note = 2'-fluoroadenosine-3'-phosphate
  modified_base 15: mod_base = OTHER; note = 2'-O-methyladenosine-3'-phosphate
  modified_base 16: mod_base = OTHER; note = 2'-fluorocytidine-3'-phosphate
  modified_base 17: mod_base = OTHER; note = 2'-O-methyladenosine-3'-phosphate
  modified_base 18: mod_base = OTHER; note = 2'-O-methyladenosine-3'-phosphate
  modified_base 19: mod_base = OTHER; note = 2'-O-methyladenosine-3'-phosphate
  modified_base 20: mod_base = OTHER; note = 2'-O-methylguanosine-3'-phosphate
  modified_base 21: mod_base = OTHER; note = 2'-O-methylcytidine-3'-phosphorothioate
  modified_base 22: mod_base = OTHER; note = 2'-O-methyluridine-3'-phosphorothioate
  modified_base 23: mod_base = OTHER; note = 2'-O-methylcytidine-3'-phosphate
tagtgacgggtggaacaaagctc

SEQ ID NO: 186615 - RNA, 23 nt, synthetic construct
  source 1..23: mol_type = other RNA
  modified_base 1: mod_base = OTHER; note = 2'-O-methyluridine-3'-phosphorothioate
  modified_base 2: mod_base = OTHER; note = 2'-fluoroadenosine-3'-phosphorothioate
  modified_base 3: mod_base = OTHER; note = 2'-O-methylguanosine-3'-phosphate
  modified_base 4: mod_base = OTHER; note = 2'-O-methyluridine-3'-phosphate
  modified_base 5: mod_base = OTHER; note = 2'-O-methylguanosine-3'-phosphate
  modified_base 6: mod_base = OTHER; note = Adenosine-glycol nucleic acid (GNA)
  modified_base 7: mod_base = OTHER; note = 2'-O-methylcytidine-3'-phosphate
  modified_base 8: mod_base = OTHER; note = 2'-O-methylguanosine-3'-phosphate
  modified_base 9: mod_base = OTHER; note = 2'-O-methylguanosine-3'-phosphate
  modified_base 10: mod_base = OTHER; note = 2'-O-methylguanosine-3'-phosphate
  modified_base 11: mod_base = OTHER; note = 2'-O-methyluridine-3'-phosphate
  modified_base 12: mod_base = OTHER; note = 2'-O-methylguanosine-3'-phosphate
  modified_base 13: mod_base = OTHER; note = 2'-O-methylguanosine-3'-phosphate
  modified_base 14: mod_base = OTHER; note = 2'-fluoroadenosine-3'-phosphate
  modified_base 15: mod_base = OTHER; note = 2'-O-methyladenosine-3'-phosphate
  modified_base 16: mod_base = OTHER; note = 2'-fluorocytidine-3'-phosphate
  modified_base 17: mod_base = OTHER; note = 2'-O-methyladenosine-3'-phosphate
  modified_base 18: mod_base = OTHER; note = 2'-O-methyladenosine-3'-phosphate
  modified_base 19: mod_base = OTHER; note = 2'-O-methyladenosine-3'-phosphate
  modified_base 20: mod_base = OTHER; note = 2'-O-methylguanosine-3'-phosphate
  modified_base 21: mod_base = OTHER; note = 2'-O-methylcytidine-3'-phosphorothioate
  modified_base 22: mod_base = OTHER; note = 2'-O-methyluridine-3'-phosphorothioate
  modified_base 23: mod_base = OTHER; note = 2'-O-methylcytidine-3'-phosphate
tagtgacgggtggaacaaagctc

SEQ ID NO: 186616 - RNA, 23 nt, synthetic construct
  source 1..23: mol_type = other RNA
  modified_base 1: mod_base = OTHER; note = 2'-O-methyluridine-3'-phosphorothioate
  modified_base 2: mod_base = OTHER; note = 2'-fluoroadenosine-3'-phosphorothioate
  modified_base 3: mod_base = OTHER; note = 2'-O-methylguanosine-3'-phosphate
  modified_base 4: mod_base = OTHER; note = 2'-O-methyluridine-3'-phosphate
  modified_base 5: mod_base = OTHER; note = 2'-O-methylguanosine-3'-phosphate
  modified_base 6: mod_base = OTHER; note = 2'-fluoroadenosine-3'-phosphate
  modified_base 7: mod_base = OTHER; note = Cytidine-glycol nucleic acid (GNA)
  modified_base 8: mod_base = OTHER; note = 2'-O-methylguanosine-3'-phosphate
  modified_base 9: mod_base = OTHER; note = 2'-O-methylguanosine-3'-phosphate
  modified_base 10: mod_base = OTHER; note = 2'-O-methylguanosine-3'-phosphate
  modified_base 11: mod_base = OTHER; note = 2'-O-methyluridine-3'-phosphate
  modified_base 12: mod_base = OTHER; note = 2'-O-methylguanosine-3'-phosphate
  modified_base 13: mod_base = OTHER; note = 2'-O-methylguanosine-3'-phosphate
  modified_base 14: mod_base = OTHER; note = 2'-fluoroadenosine-3'-phosphate
  modified_base 15: mod_base = OTHER; note = 2'-O-methyladenosine-3'-phosphate
  modified_base 16: mod_base = OTHER; note = 2'-fluorocytidine-3'-phosphate
  modified_base 17: mod_base = OTHER; note = 2'-O-methyladenosine-3'-phosphate
  modified_base 18: mod_base = OTHER; note = 2'-O-methyladenosine-3'-phosphate
  modified_base 19: mod_base = OTHER; note = 2'-O-methyladenosine-3'-phosphate
  modified_base 20: mod_base = OTHER; note = 2'-O-methylguanosine-3'-phosphate
  modified_base 21: mod_base = OTHER; note = 2'-O-methylcytidine-3'-phosphorothioate
  modified_base 22: mod_base = OTHER; note = 2'-O-methyluridine-3'-phosphorothioate
  modified_base 23: mod_base = OTHER; note = 2'-O-methylcytidine-3'-phosphate
tagtgacgggtggaacaaagctc

SEQ ID NO: 186617 - RNA, 23 nt, synthetic construct
  source 1..23: mol_type = other RNA
  modified_base 1: mod_base = OTHER; note = 2'-O-methyluridine-3'-phosphorothioate
  modified_base 2: mod_base = OTHER; note = 2'-fluoroadenosine-3'-phosphorothioate
  modified_base 3: mod_base = OTHER; note = 2'-O-methylguanosine-3'-phosphate
  modified_base 4: mod_base = OTHER; note = 2'-O-methyluridine-3'-phosphate
  modified_base 5: mod_base = OTHER; note = 2'-O-methylguanosine-3'-phosphate
  modified_base 6: mod_base = OTHER; note = 2'-fluoroadenosine-3'-phosphate
  modified_base 7: mod_base = OTHER; note = 2'-O-methyluridine-3'-phosphate
  modified_base 8: mod_base = OTHER; note = 2'-O-methylguanosine-3'-phosphate
  modified_base 9: mod_base = OTHER; note = 2'-O-methylguanosine-3'-phosphate
  modified_base 10: mod_base = OTHER; note = 2'-O-methylguanosine-3'-phosphate
  modified_base 11: mod_base = OTHER; note = 2'-O-methyluridine-3'-phosphate
  modified_base 12: mod_base = OTHER; note = 2'-O-methylguanosine-3'-phosphate
  modified_base 13: mod_base = OTHER; note = 2'-O-methylguanosine-3'-phosphate
  modified_base 14: mod_base = OTHER; note = 2'-fluoroadenosine-3'-phosphate
  modified_base 15: mod_base = OTHER; note = 2'-O-methyladenosine-3'-phosphate
  modified_base 16: mod_base = OTHER; note = 2'-fluorocytidine-3'-phosphate
  modified_base 17: mod_base = OTHER; note = 2'-O-methyladenosine-3'-phosphate
  modified_base 18: mod_base = OTHER; note = 2'-O-methyladenosine-3'-phosphate
  modified_base 19: mod_base = OTHER; note = 2'-O-methyladenosine-3'-phosphate
  modified_base 20: mod_base = OTHER; note = 2'-O-methylguanosine-3'-phosphate
  modified_base 21: mod_base = OTHER; note = 2'-O-methylcytidine-3'-phosphorothioate
  modified_base 22: mod_base = OTHER; note = 2'-O-methyluridine-3'-phosphorothioate
  modified_base 23: mod_base = OTHER; note = 2'-O-methylcytidine-3'-phosphate
tagtgatgggtggaacaaagctc

SEQ ID NO: 186618 - RNA, 23 nt, synthetic construct
  source 1..23: mol_type = other RNA
  modified_base 1: mod_base = OTHER; note = 2'-O-methyluridine-3'-phosphorothioate
  modified_base 2: mod_base = OTHER; note = 2'-fluoroadenosine-3'-phosphorothioate
  modified_base 3: mod_base = OTHER; note = 2'-O-methylguanosine-3'-phosphate
  modified_base 4: mod_base = OTHER; note = 2'-O-methyluridine-3'-phosphate
  modified_base 5: mod_base = OTHER; note = 2'-O-methylguanosine-3'-phosphate
  modified_base 6: mod_base = OTHER; note = 2'-fluoroadenosine-3'-phosphate
  modified_base 7: mod_base = OTHER; note = 2'-O-methylcytidine-3'-phosphate
  modified_base 8: mod_base = OTHER; note = 2'-O-methylguanosine-3'-phosphate
  modified_base 9: mod_base = OTHER; note = 2'-O-methylguanosine-3'-phosphate
  modified_base 10: mod_base = OTHER; note = 2'-O-methylguanosine-3'-phosphate
  modified_base 11: mod_base = OTHER; note = 2'-O-methyluridine-3'-phosphate
  modified_base 12: mod_base = OTHER; note = 2'-O-methylguanosine-3'-phosphate
  modified_base 13: mod_base = OTHER; note = 2'-O-methylguanosine-3'-phosphate
  modified_base 14: mod_base = OTHER; note = 2'-fluoroadenosine-3'-phosphate
  modified_base 15: mod_base = OTHER; note = 2'-O-methyladenosine-3'-phosphate
  modified_base 16: mod_base = OTHER; note = 2'-fluorocytidine-3'-phosphate
  modified_base 17: mod_base = OTHER; note = 2'-O-methyladenosine-3'-phosphate
  modified_base 18: mod_base = OTHER; note = 2'-O-methyladenosine-3'-phosphate
  modified_base 19: mod_base = OTHER; note = 2'-O-methyladenosine-3'-phosphate
  modified_base 20: mod_base = OTHER; note = 2'-O-methylguanosine-3'-phosphate
  modified_base 21: mod_base = OTHER; note = 2'-O-methylcytidine-3'-phosphorothioate
  modified_base 22: mod_base = OTHER; note = 2'-O-methoxyethyl-5-methyluridine-3'-phosphorothioate
  modified_base 23: mod_base = OTHER; note = 2'-O-methoxyethylcytidine-3'-phosphate
tagtgacgggtggaacaaagctc

SEQ ID NO: 186619 - RNA, 23 nt, synthetic construct
  source 1..23: mol_type = other RNA
  modified_base 1: mod_base = OTHER; note = 5'-vinyl-phosphonate 2'-O-methyluridine-3'-phosphorothioate
  modified_base 2: mod_base = OTHER; note = 2'-O-methyladenosine-3'-phosphorothioate
  modified_base 3: mod_base = OTHER; note = 2'-O-methylguanosine-3'-phosphate
  modified_base 4: mod_base = OTHER; note = 2'-O-methyluridine-3'-phosphate
  modified_base 5: mod_base = OTHER; note = 2'-O-methylguanosine-3'-phosphate
  modified_base 6: mod_base = OTHER; note = 2'-fluoroadenosine-3'-phosphate
  modified_base 7: mod_base = OTHER; note = 2'-O-methylcytidine-3'-phosphate
  modified_base 8: mod_base = OTHER; note = 2'-O-methylguanosine-3'-phosphate
  modified_base 9: mod_base = OTHER; note = 2'-O-methylguanosine-3'-phosphate
  modified_base 10: mod_base = OTHER; note = 2'-O-methylguanosine-3'-phosphate
  modified_base 11: mod_base = OTHER; note = 2'-O-methyluridine-3'-phosphate
  modified_base 12: mod_base = OTHER; note = 2'-O-methylguanosine-3'-phosphate
  modified_base 13: mod_base = OTHER; note = 2'-O-methylguanosine-3'-phosphate
  modified_base 14: mod_base = OTHER; note = 2'-fluoroadenosine-3'-phosphate
  modified_base 15: mod_base = OTHER; note = 2'-O-methyladenosine-3'-phosphate
  modified_base 16: mod_base = OTHER; note = 2'-fluorocytidine-3'-phosphate
  modified_base 17: mod_base = OTHER; note = 2'-O-methyladenosine-3'-phosphate
  modified_base 18: mod_base = OTHER; note = 2'-O-methyladenosine-3'-phosphate
  modified_base 19: mod_base = OTHER; note = 2'-O-methyladenosine-3'-phosphate
  modified_base 20: mod_base = OTHER; note = 2'-O-methylguanosine-3'-phosphate
  modified_base 21: mod_base = OTHER; note = 2'-O-methylcytidine-3'-phosphorothioate
  modified_base 22: mod_base = OTHER; note = 2'-O-methyluridine-3'-phosphorothioate
  modified_base 23: mod_base = OTHER; note = 2'-O-methylcytidine-3'-phosphate
tagtgacgggtggaacaaagctc

SEQ ID NO: 186620 - RNA, 23 nt, synthetic construct
  source 1..23: mol_type = other RNA
  modified_base 1: mod_base = OTHER; note = 2'-O-methyluridine-3'-phosphorothioate
  modified_base 2: mod_base = OTHER; note = 2'-fluoroadenosine-3'-phosphorothioate
  modified_base 3: mod_base = OTHER; note = 2'-O-methylguanosine-3'-phosphate
  modified_base 4: mod_base = OTHER; note = 2'-O-methyluridine-3'-phosphate
  modified_base 5: mod_base = OTHER; note = 2'-O-methylguanosine-3'-phosphate
  modified_base 6: mod_base = OTHER; note = Abasic nucleotide
  modified_base 7: mod_base = OTHER; note = 2'-O-methylcytidine-3'-phosphate
  modified_base 8: mod_base = OTHER; note = 2'-O-methylguanosine-3'-phosphate
  modified_base 9: mod_base = OTHER; note = 2'-O-methylguanosine-3'-phosphate
  modified_base 10: mod_base = OTHER; note = 2'-O-methylguanosine-3'-phosphate
  modified_base 11: mod_base = OTHER; note = 2'-O-methyluridine-3'-phosphate
  modified_base 12: mod_base = OTHER; note = 2'-O-methylguanosine-3'-phosphate
  modified_base 13: mod_base = OTHER; note = 2'-O-methylguanosine-3'-phosphate
  modified_base 14: mod_base = OTHER; note = 2'-fluoroadenosine-3'-phosphate
  modified_base 15: mod_base = OTHER; note = 2'-O-methyladenosine-3'-phosphate
  modified_base 16: mod_base = OTHER; note = 2'-fluorocytidine-3'-phosphate
  modified_base 17: mod_base = OTHER; note = 2'-O-methyladenosine-3'-phosphate
  modified_base 18: mod_base = OTHER; note = 2'-O-methyladenosine-3'-phosphate
  modified_base 19: mod_base = OTHER; note = 2'-O-methyladenosine-3'-phosphate
  modified_base 20: mod_base = OTHER; note = 2'-O-methylguanosine-3'-phosphate
  modified_base 21: mod_base = OTHER; note = 2'-O-methylcytidine-3'-phosphorothioate
  modified_base 22: mod_base = OTHER; note = 2'-O-methyluridine-3'-phosphorothioate
  modified_base 23: mod_base = OTHER; note = 2'-O-methylcytidine-3'-phosphate
tagtgncgggtggaacaaagctc

SEQ ID NO: 186621 - RNA, 23 nt, synthetic construct
  source 1..23: mol_type = other RNA
  modified_base 1: mod_base = OTHER; note = 2'-O-methyluridine-3'-phosphorothioate
  modified_base 2: mod_base = OTHER; note = 2'-fluoroadenosine-3'-phosphorothioate
  modified_base 3: mod_base = OTHER; note = 2'-O-methylguanosine-3'-phosphate
  modified_base 4: mod_base = OTHER; note = 2'-O-methyluridine-3'-phosphate
  modified_base 5: mod_base = OTHER; note = 2'-O-methylguanosine-3'-phosphate
  modified_base 6: mod_base = OTHER; note = Abasic nucleotide
  modified_base 7: mod_base = OTHER; note = 2'-O-methylcytidine-3'-phosphate
  modified_base 8: mod_base = OTHER; note = 2'-O-methylguanosine-3'-phosphate
  modified_base 9: mod_base = OTHER; note = 2'-O-methylguanosine-3'-phosphate
  modified_base 10: mod_base = OTHER; note = 2'-O-methylguanosine-3'-phosphate
  modified_base 11: mod_base = OTHER; note = 2'-O-methyluridine-3'-phosphate
  modified_base 12: mod_base = OTHER; note = 2'-O-methylguanosine-3'-phosphate
  modified_base 13: mod_base = OTHER; note = 2'-O-methylguanosine-3'-phosphate
  modified_base 14: mod_base = OTHER; note = 2'-fluoroadenosine-3'-phosphate
  modified_base 15: mod_base = OTHER; note = 2'-O-methyladenosine-3'-phosphate
  modified_base 16: mod_base = OTHER; note = 2'-fluorocytidine-3'-phosphate
  modified_base 17: mod_base = OTHER; note = 2'-O-methyladenosine-3'-phosphate
  modified_base 18: mod_base = OTHER; note = 2'-O-methyladenosine-3'-phosphate
  modified_base 19: mod_base = OTHER; note = 2'-O-methyladenosine-3'-phosphate
  modified_base 20: mod_base = OTHER; note = 2'-O-methylguanosine-3'-phosphate
  modified_base 21: mod_base = OTHER; note = 2'-O-methylcytidine-3'-phosphorothioate
  modified_base 22: mod_base = OTHER; note = 2'-O-methyluridine-3'-phosphorothioate
  modified_base 23: mod_base = OTHER; note = 2'-O-methylcytidine-3'-phosphate
tagtgncgggtggaacaaagctc

SEQ ID NO: 186622 - RNA, 17 nt, synthetic construct
  source 1..17: mol_type = other RNA
  modified_base 1: mod_base = OTHER; note = 2'-O-methylcytidine-3'-phosphate
  modified_base 2: mod_base = OTHER; note = 2'-O-methylguanosine-3'-phosphate
  modified_base 3: mod_base = OTHER; note = 2'-O-methylguanosine-3'-phosphate
  modified_base 4: mod_base = OTHER; note = 2'-O-methylguanosine-3'-phosphate
  modified_base 5: mod_base = OTHER; note = 2'-O-methyluridine-3'-phosphate
  modified_base 6: mod_base = OTHER; note = 2'-O-methylguanosine-3'-phosphate
  modified_base 7: mod_base = OTHER; note = 2'-O-methylguanosine-3'-phosphate
  modified_base 8: mod_base = OTHER; note = 2'-fluoroadenosine-3'-phosphate
  modified_base 9: mod_base = OTHER; note = 2'-O-methyladenosine-3'-phosphate
  modified_base 10: mod_base = OTHER; note = 2'-fluorocytidine-3'-phosphate
  modified_base 11: mod_base = OTHER; note = 2'-O-methyladenosine-3'-phosphate
  modified_base 12: mod_base = OTHER; note = 2'-O-methyladenosine-3'-phosphate
  modified_base 13: mod_base = OTHER; note = 2'-O-methyladenosine-3'-phosphate
  modified_base 14: mod_base = OTHER; note = 2'-O-methylguanosine-3'-phosphate
  modified_base 15: mod_base = OTHER; note = 2'-O-methylcytidine-3'-phosphorothioate
  modified_base 16: mod_base = OTHER; note = 2'-O-methyluridine-3'-phosphorothioate
  modified_base 17: mod_base = OTHER; note = 2'-O-methylcytidine-3'-phosphate
cgggtggaacaaagctc

SEQ ID NO: 186623 - RNA, 23 nt, synthetic construct
  source 1..23: mol_type = other RNA
  modified_base 1: mod_base = OTHER; note = 2'-O-methyluridine-3'-phosphorothioate
  modified_base 2: mod_base = OTHER; note = 2'-fluoroadenosine-3'-phosphorothioate
  modified_base 3: mod_base = OTHER; note = 2'-O-methylguanosine-3'-phosphate
  modified_base 4: mod_base = OTHER; note = 2'-O-methyluridine-3'-phosphate
  modified_base 5: mod_base = OTHER; note = 2'-O-methylguanosine-3'-phosphate
  modified_base 6: mod_base = OTHER; note = 2'-O-methyl modified abasic nucleotide
  modified_base 7: mod_base = OTHER; note = 2'-O-methylcytidine-3'-phosphate
  modified_base 8: mod_base = OTHER; note = 2'-O-methylguanosine-3'-phosphate
  modified_base 9: mod_base = OTHER; note = 2'-O-methylguanosine-3'-phosphate
  modified_base 10: mod_base = OTHER; note = 2'-O-methylguanosine-3'-phosphate
  modified_base 11: mod_base = OTHER; note = 2'-O-methyluridine-3'-phosphate
  modified_base 12: mod_base = OTHER; note = 2'-O-methylguanosine-3'-phosphate
  modified_base 13: mod_base = OTHER; note = 2'-O-methylguanosine-3'-phosphate
  modified_base 14: mod_base = OTHER; note = 2'-fluoroadenosine-3'-phosphate
  modified_base 15: mod_base = OTHER; note = 2'-O-methyladenosine-3'-phosphate
  modified_base 16: mod_base = OTHER; note = 2'-fluorocytidine-3'-phosphate
  modified_base 17: mod_base = OTHER; note = 2'-O-methyladenosine-3'-phosphate
  modified_base 18: mod_base = OTHER; note = 2'-O-methyladenosine-3'-phosphate
  modified_base 19: mod_base = OTHER; note = 2'-O-methyladenosine-3'-phosphate
  modified_base 20: mod_base = OTHER; note = 2'-O-methylguanosine-3'-phosphate
  modified_base 21: mod_base = OTHER; note = 2'-O-methylcytidine-3'-phosphorothioate
  modified_base 22: mod_base = OTHER; note = 2'-O-methyluridine-3'-phosphorothioate
  modified_base 23: mod_base = OTHER; note = 2'-O-methylcytidine-3'-phosphate
tagtgncgggtggaacaaagctc

SEQ ID NO: 186624 - RNA, 23 nt, synthetic construct
  source 1..23: mol_type = other RNA
  modified_base 1: mod_base = OTHER; note = 2'-O-methyluridine-3'-phosphorothioate
  modified_base 2: mod_base = OTHER; note = 2'-fluoroadenosine-3'-phosphorothioate
  modified_base 3: mod_base = OTHER; note = 2'-O-methylguanosine-3'-phosphate
  modified_base 4: mod_base = OTHER; note = 2'-O-methyluridine-3'-phosphate
  modified_base 5: mod_base = OTHER; note = 2'-O-methylguanosine-3'-phosphate
  modified_base 6: mod_base = OTHER; note = 2'-fluoro modified abasic nucleotide
  modified_base 7: mod_base = OTHER; note = 2'-O-methylcytidine-3'-phosphate
  modified_base 8: mod_base = OTHER; note = 2'-O-methylguanosine-3'-phosphate
  modified_base 9: mod_base = OTHER; note = 2'-O-methylguanosine-3'-phosphate
  modified_base 10: mod_base = OTHER; note = 2'-O-methylguanosine-3'-phosphate
  modified_base 11: mod_base = OTHER; note = 2'-O-methyluridine-3'-phosphate
  modified_base 12: mod_base = OTHER; note = 2'-O-methylguanosine-3'-phosphate
  modified_base 13: mod_base = OTHER; note = 2'-O-methylguanosine-3'-phosphate
  modified_base 14: mod_base = OTHER; note = 2'-fluoroadenosine-3'-phosphate
  modified_base 15: mod_base = OTHER; note = 2'-O-methyladenosine-3'-phosphate
  modified_base 16: mod_base = OTHER; note = 2'-fluorocytidine-3'-phosphate
  modified_base 17: mod_base = OTHER; note = 2'-O-methyladenosine-3'-phosphate
  modified_base 18: mod_base = OTHER; note = 2'-O-methyladenosine-3'-phosphate
  modified_base 19: mod_base = OTHER; note = 2'-O-methyladenosine-3'-phosphate
  modified_base 20: mod_base = OTHER; note = 2'-O-methylguanosine-3'-phosphate
  modified_base 21: mod_base = OTHER; note = 2'-O-methylcytidine-3'-phosphorothioate
  modified_base 22: mod_base = OTHER; note = 2'-O-methyluridine-3'-phosphorothioate
  modified_base 23: mod_base = OTHER; note = 2'-O-methylcytidine-3'-phosphate
tagtgncgggtggaacaaagctc
